(19) United States
(12) Patent Application Publication
(10) Pub. No.: US 2009/0182134 A1
(43) Pub. Date: Jul. 16, 2009

(54) siRNA targeting phosphatases

(75) Inventors: Anastasia Khvorova, Boulder, CO (US); Angela Reynolds, Conifer, CO (US); Devin Leake, Denver, CO (US); William Marshall, Boulder, CO (US); Steven Read, Denver, CO (US); Stephen Scaringe, Lafayette, CO (US)

Correspondence Address: KALOW & SPRINGUT LLP, 488 MADISON AVENUE, 19TH FLOOR, NEW YORK, NY, 10022, US

(73) Assignee: DHARMACON, INC., Lafayette, CO (US)

(21) Appl. No.: 11/977,406

(22) Filed: Oct. 24, 2007

Related U.S. Application Data
(63) Continuation-in-part of application No. 10/940,892, filed on Sep. 14, 2004.
Application No. 10/940,892 is a continuation of application No. PCT/US04/14885, filed on May 12, 2004.
Application No. PCT/US04/14885 is a continuation-in-part of application No. 10/714,333, filed on Nov. 14, 2003.
(60) Provisional application No. 60/426,137, filed on Nov. 14, 2002.
(60) Provisional application No. 60/502,050, filed on Sep. 10, 2003.

(51) Int. Cl. C07H 21/02

(52) U.S. Cl. 536/23.1

(57) ABSTRACT

Efficient sequence specific gene silencing is possible through the use of siRNA technology. By selecting particular siRNAs by rational design, one can maximize the generation of an effective gene silencing reagent, as well as methods for silencing genes. Methods, compositions, and kits generated through rational design of siRNAs are disclosed including those directed to phosphatases.

### CROSS-REFERENCE TO RELATED APPLICATIONS

[0001] This application is a continuation-in-part of U.S. Ser. No. 10/714,333, filed Nov. 14, 2003, which claims the benefit of U.S. Provisional Application No. 60/426,137, filed Nov. 14, 2002, and also claims the benefit of U.S. Provisional Application No. 60/502,050, filed Sep. 10, 2003; this application is also a continuation-in-part of U.S. Ser. No. 10/940,892, filed Sep. 14, 2004, which is a continuation of PCT Application No. PCT/US04/14885, international filing date May 12, 2004. The disclosures of the priority applications, including the sequence listings and tables submitted in electronic form in lieu of paper, are incorporated by reference into the instant specification.

### SEQUENCE LISTING

[0002] The sequence listing for this application has been submitted in accordance with 37 CFR §1.52(e) and 37 CFR §1.821 on CD-ROM in lieu of paper on a disk containing the sequence listing file entitled “DHARMA_{—}2100-US75_CRF.txt” created Sep. 28, 2007, 1.17 MB. Applicants hereby incorporate by reference the sequence listing provided on CD-ROM in lieu of paper into the instant specification.

### FIELD OF INVENTION

[0003] The present invention relates to RNA interference (“RNAi”).

### BACKGROUND OF THE INVENTION

[0004] Relatively recently, researchers observed that double stranded RNA (“dsRNA”) could be used to inhibit protein expression. This ability to silence a gene has broad potential for treating human diseases, and many researchers and commercial entities are currently investing considerable resources in developing therapies based on this technology.

[0005] Double stranded RNA induced gene silencing can occur on at least three different levels: (i) transcription inactivation, which refers to RNA guided DNA or histone methylation; (ii) siRNA induced mRNA degradation; and (iii) mRNA induced transcriptional attenuation.

[0006] It is generally considered that the major mechanism of RNA induced silencing (RNA interference, or RNAi) in mammalian cells is mRNA degradation. Initial attempts to use RNAi in mammalian cells focused on the use of long strands of dsRNA. However, these attempts to induce RNAi met with limited success, due in part to the induction of the interferon response, which results in a general, as opposed to a target-specific, inhibition of protein synthesis. Thus, long dsRNA is not a viable option for RNAi in mammalian systems.

[0007] More recently it has been shown that when short (18-30 bp) RNA duplexes are introduced into mammalian cells in culture, sequence-specific inhibition of target mRNA can be realized without inducing an interferon response. Certain of these short dsRNAs, referred to as small inhibitory RNAs (“siRNAs”), can act catalytically at sub-molar concentrations to cleave greater than 95% of the target mRNA in the cell. A description of the mechanisms for siRNA activity, as well as some of its applications are described in Provost et al. (2002) Ribonuclease Activity and RNA Binding of Recombinant Human Dicer, EMBO J. 21(21): 5864-5874; Tabara et al. (2002) The dsRNA Binding Protein RDE-4 Interacts with RDE-1, DCR-1 and a DexH-box Helicase to Direct RNAi in C. elegans, Cell 109(7):861-71; Ketting et al. (2002) Dicer Functions in RNA Interference and in Synthesis of Small RNA Involved in Developmental Timing in C. elegans; Martinez et al., Single-Stranded Antisense siRNAs Guide Target RNA Cleavage in RNAi, Cell 110(5):563; Hutvagner & Zamore (2002) A microRNA in a multiple-turnover RNAi enzyme complex, Science 297:2056.

[0008] From a mechanistic perspective, introduction of long double stranded RNA into plants and invertebrate cells is broken down into siRNA by a Type II endonuclease known as Dicer. Sharp, RNA interference—2001, Genes Dev. 2001, 15:485. Dicer, a ribonuclease-III-like enzyme, processes the dsRNA into 19-23 base pair short interfering RNAs with characteristic two base 3′ overhangs. Bernstein, Caudy, Hammond, & Hannon (2001) Role for a bidentate ribonuclease in the initiation step of RNA interference, Nature 409:363. The siRNAs are then incorporated into an RNA-induced silencing complex (RISC) where one or more helicases unwind the siRNA duplex, enabling the complementary antisense strand to guide target recognition. Nykanen, Haley, & Zamore (2001) ATP requirements and small interfering RNA structure in the RNA interference pathway, Cell 107:309. Upon binding to the appropriate target mRNA, one or more endonucleases within the RISC cleaves the target to induce silencing. Elbashir, Lendeckel, & Tuschl (2001) RNA interference is mediated by 21- and 22-nucleotide RNAs, Genes Dev. 15:188, FIG. 1.

[0009] The interference effect can be long lasting and may be detectable after many cell divisions. Moreover, RNAi exhibits sequence specificity. Kisielow, M. et al., (2002) Isoform-specific knockdown and expression of adaptor protein ShcA using small interfering RNA, J. Biochem. 363: 1-5. Thus, the RNAi machinery can specifically knock down one type of transcript, while not affecting closely related mRNA. These properties make siRNA a potentially valuable tool for inhibiting gene expression and studying gene function and drug target validation. Moreover, siRNAs are potentially useful as therapeutic agents against: (1) diseases that are caused by over-expression or misexpression of genes; and (2) diseases brought about by expression of genes that contain mutations.

[0010] Successful siRNA-dependent gene silencing depends on a number of factors. One of the most contentious issues in RNAi is the question of the necessity of siRNA design, i.e., considering the sequence of the siRNA used. Early work in C. elegans and plants circumvented the issue of design by introducing long dsRNA (see, for instance, Fire, A. et al. (1998) Nature 391:806-811). In this primitive organism, long dsRNA molecules are cleaved into siRNA by Dicer, thus generating a diverse population of duplexes that can potentially cover the entire transcript. While some fraction of these molecules are non-functional (i.e., induce little or no silencing) one or more have the potential to be highly functional, thereby silencing the gene of interest and alleviating the need for siRNA design. Unfortunately, due to the interferon response, this same approach is unavailable for mammalian systems. While this effect can be circumvented by bypassing the Dicer cleavage step and directly introducing siRNA, this tactic carries with it the risk that the chosen siRNA sequence may be non-functional or semi-functional.

[0011] A number of researches have expressed the view that siRNA design is not a crucial element of RNAi. On the other hand, others in the field have begun to explore the possibility that RNAi can be made more efficient by paying attention to the design of the siRNA. Unfortunately, none of the reported methods have provided a satisfactory scheme for reliably selecting siRNA with acceptable levels of functionality. Accordingly, there is a need to develop rational criteria by which to select siRNA with an acceptable level of functionality, and to identify siRNA that have this improved level of functionality, as well as to identify siRNAs that are hyperfunctional.

### SUMMARY OF THE INVENTION

[0012] The present invention is directed to increasing the efficiency of RNAi, particularly in mammalian systems. Accordingly, the present invention provides kits, siRNAs and methods for increasing siRNA efficacy.

[0013] According to a first embodiment, the present invention provides a kit for gene silencing, wherein said kit is comprised of a pool of at least two siRNA duplexes, each of which is comprised of a sequence that is complementary to a portion of the sequence of one or more target messenger RNA, and each of which is selected using non-target specific criteria.

[0014] According to a second embodiment, the present invention provides a method for selecting an siRNA, said method comprising applying selection criteria to a set of potential siRNA that comprise 18-30 base pairs, wherein said selection criteria are non-target specific criteria, and said set comprises at least two siRNAs and each of said at least two siRNAs contains a sequence that is at least substantially complementary to a target gene; and determining the relative functionality of the at least two siRNAs.

[0015] According to a third embodiment, the present invention also provides a method for selecting an siRNA wherein said selection criteria are embodied in a formula comprising:

(−14)*G₁₃−13*A₁−12*U₇−11*U₂−10*A₁₁−10*U₄−10*C₃−10*C₅−10*C₆−9*A₁₀−

9*U₉−9*C₁₈−8*G₁₀−7*U₁−7*U₁₆−7*C₁₇−7*C₁₉+7*U₁₇+8*A₂+8*A₄+8*A₅+8*C₄

+9*G₈+10*A₇+10*U₁₈+11*A₁₉+11*C₉+15*G₁+18*A₃+19*U₁₀−Tm−3*(GCₜₒₜₐₗ)

−6*(GC₁₅₋₁₉)−30*X; or Formula VIII

(−8)*A1+(−1)*A2+(12)*A3+(7)*A4+(18)*A5+(12)*A6+

(19)*A7+(6)*A8+(−4)*A9+(−5)*A10+(−2)*A11+(−5)*A12+(17)*A13+(−

3)*A14+(4)*A15+(2)*A16+(8)*A17+(11)*A18+(30)*A19+(−13)*U1+(−

10)*U2+(2)*U3+(−2)*U4+(−5)*U5+(5)*U6+(−2)*U7+(−10)*U8+(−

5)*U9+(15)*U10+(−1)*U11+(0)*U12+(10)*U13+(−9)*U14+(−13)*U15+(−

10)*U16+(3)*U17+(9)*U18+(9)*U19+(7)*C1+(3)*C2+(−21)*C3+(5)*C4+(−

9)*C5+(−20)*C6+(−18)*C7+(−5)*C8+(5)*C9+(1)*C10+(2)*C11+(−

5)*C12+(−3)*C13+(−6)*C14+(−2)*C15+(−5)*C16+(−3)*C17+(−12)*C18+(−

18)*C19+(14)*G1+(8)*G2+(7)*G3+(−10)*G4+(−

4)*G5+(2)*G6+(1)*G7+(9)*G8+(5)*G9+(−11)*G10+(1)*G11+(9)*G12+(−

24)*G13+(18)*G14+(11)*G15+(13)*G16+(−7)*G17+(−9)*G18+(−22)*G19+

6*(number of A+U in position 15-19)−3*(number of G+C in whole

siRNA), Formula X

wherein position numbering begins at the 5′-most position of a sense strand, and
A₁=1 if A is the base at position 1 of the sense strand, otherwise its value: is 0;
A₂=1 if A is the base at position 2 of the sense strand, otherwise its value: is 0;
A₃=1 if A is the base at position 3 of the sense strand, otherwise its value: is 0;
A₄=1 if A is the base at position 4 of the sense strand, otherwise its value is 0;
A₅=1 if A is the base at position 5 of the sense strand, otherwise its value is 0;
A₆=1 if A is the base at position 6 of the sense strand, otherwise its value is 0;
A₇=1 if A is the base at position 7 of the sense strand, otherwise its value is 0;
A₁₀=1 if A is the base at position 10 of the sense strand, otherwise its value is 0;
A₁₁=1 if A is the base at position 11 of the sense strand, otherwise its value is 0;
A₁₃=1 if A is the base at position 13 of the sense strand, otherwise its value is 0;
A₁₉=1 if A is the base at position 19 of the sense strand, otherwise if another base is present or the sense strand is only 18 base pairs in length, its value is 0;
C₃=1 if C is the base at position 3 of the sense strand, otherwise its value is 0;
C₄=1 if C is the base at position 4 of the sense strand, otherwise its value is 0;
C₅=1 if C is the base at position 5 of the sense strand, otherwise its value is 0;
C₆=1 if C is the base at position 6 of the sense strand, otherwise its value is 0;
C₇=1 if C is the base at position 7 of the sense strand, otherwise its value: is 0;
C₉=1 if C is the base at position 9 of the sense strand, otherwise its value is 0;
C₁₇=1 if C is the base at position 17 of the sense strand, otherwise its value is 0;
C₁₈=1 if C is the base at position 18 of the sense strand, otherwise its value is 0;
C₁₉=1 if C is the base at position 19 of the sense strand, otherwise if another base is present or the sense strand is only 18 base pairs in length, its value is 0;
G₁=1 if G is the base at position 1 on the sense strand, otherwise its value is 0;
G₂=1 if G is the base at position 2 of the sense strand, otherwise its value is 0;
G₈=1 if G is the base at position 8 on the sense strand, otherwise its value is 0;
G₁₀=1 if G is the base at position 10 on the sense strand, otherwise its value is 0;
G₁₃=1 if G is the base at position 13 on the sense strand, otherwise its value is 0;
G₁₉=1 if G is the base at position 19 of the sense strand, otherwise if another base is present or the sense strand is only 18 base pairs in length, its value is 0;
U₁=1 if U is the base at position 1 on the sense strand, otherwise its value is 0;
U₂=1 if U is the base at position 2 on the sense strand, otherwise its value is 0;
U₃=1 if U is the base at position 3 on the sense strand, otherwise its value is 0;
U₄=1 if U is the base at position 4 on the sense strand, otherwise its value is 0;
U₇=1 if U is the base at position 7 on the sense strand, otherwise its value is 0;
U₉=1 if U is the base at position 9 on the sense strand, otherwise its value is 0;
U₁₀=1 if U is the base at position 10 on the sense strand, otherwise its value is 0;
U₁₅=1 if U is the base at position 15 on the sense strand, otherwise its value is 0;
U₁₆=1 if U is the base at position 16 on the sense strand, otherwise its value is 0;
U₁₇=1 if U is the base at position 17 on the sense strand, otherwise its value is 0;
U₁₈=1 if U is the base at position 18 on the sense strand, otherwise its value is 0.
GC₁₅₋₁₉=the number of G and C bases within positions 15-19 of the sense strand, or within positions 15-18 if the sense strand is only 18 base pairs in length;
GCₜₒₜₐₗ=the number of G and C bases in the sense strand;
Tm=100 if the si RNA oligo has the internal repeat longer then 4 base pairs, otherwise its value is 0; and
X=the number of times that the same nucleotide repeats four or more times in a row.

[0016] According to a fourth embodiment, the invention provides a method for developing an algorithm for selecting siRNA, said method comprising: (a) selecting a set of siRNA; (b) measuring gene silencing ability of each siRNA from said set; (c) determining relative functionality of each siRNA; (d) determining improved functionality by the presence or absence of at least one variable selected from the group consisting of the presence or absence of a particular nucleotide at a particular position, the total number of As and Us in positions 15-19, the number of times that the same nucleotide repeats within a given sequence, and the total number of Gs and Cs; and (e) developing an algorithm using the information of step (d).

[0017] According to a fifth embodiment, the present invention provides a kit, wherein said kit is comprised of at least two siRNAs, wherein said at least two siRNAs comprise a first optimized siRNA and a second optimized siRNA, wherein said first optimized siRNA and said second optimized siRNA are optimized according a formula comprising Formula X.

[0018] The present invention also provides a method for identifying a hyperfunctional siRNA, comprising applying selection criteria to a set of potential siRNA that comprise 18-30 base pairs, wherein said selection criteria are non-target specific criteria, and said set comprises at least two siRNAs and each of said at least two siRNAs contains a sequence that is at least substantially complementary to a target gene; determining the relative functionality of the at least two siRNAs and assigning each of the at least two siRNAs a functionality score; and selecting siRNAs from the at least two siRNAs that have a functionality score that reflects greater than 80 percent silencing at a concentration in the picomolar range, wherein said greater than 80 percent silencing endures for greater than 120 hours.

[0019] According to a sixth embodiment, the present invention provides a hyperfunctional siRNA that is capable of silencing Bcl2.

[0020] According to a seventh embodiment, the present invention provides a method for developing an siRNA algorithm for selecting functional and hyperfunctional siRNAs for a given sequence. The method comprises:

[0021] (a) selecting a set of siRNAs;

[0022] (b) measuring the gene silencing ability of each siRNA from said set;

[0023] (c) determining the relative functionality of each siRNA;

[0024] (d) determining the amount of improved functionality by the presence or absence of at least one variable selected from the group consisting of the total GC content, melting temperature of the siRNA, GC content at positions 15-19, the presence or absence of a particular nucleotide at a particular position, relative thermodynamic stability at particular positions in a duplex, and the number of times that the same nucleotide repeats within a given sequence; and

[0025] (e) developing an algorithm using the information of step (d).

[0026] According to this embodiment, preferably the set of siRNAs comprises at least 90 siRNAs from at least one gene, more preferably at least 180 siRNAs from at least two different genes, and most preferably at least 270 and 360 siRNAs from at least three and four different genes, respectively. Additionally, in step (d) the determination is made with preferably at least two, more preferably at least three, even more preferably at least four, and most preferably all of the variables. The resulting algorithm is not target sequence specific.

[0027] In another embodiment, the present invention provides rationally designed siRNAs identified using the formulas above.

[0028] In yet another embodiment, the present invention is directed to hyperfunctional siRNA.

[0029] The ability to use the above algorithms, which are not sequence or species specific, allows for the cost-effective selection of optimized siRNAs for specific target sequences. Accordingly, there will be both greater efficiency and reliability in the use of siRNA technologies.

[0030] In various embodiments, siRNAs that target nucleotide sequences for phosphatases are provided. In various embodiments, the siRNAs are rationally designed. In various embodiments, the siRNAs are functional or hyperfunctional.

[0031] In various embodiments, an siRNA that targets a sequence for a phosphatase is provided, wherein the siRNA is selected from the group consisting of various siRNA sequences targeting nucleotide sequences for phosphatases that are disclosed herein. In various embodiments, the siRNA sequence is selected from the group consisting of SEQ ID NO. 438 to SEQ ID NO. 7090.

[0032] In various embodiments, siRNA comprising a sense region and an antisense region are provided, said sense region and said antisense region together form a duplex region comprising 18-30 base pairs, and said sense region comprises a sequence that is at least 90% similar to a sequence selected from the group consisting of siRNA sequences targeting nucleotide sequences for phosphatases that are disclosed herein. In various embodiments, the siRNA sequence is selected from the group consisting of SEQ ID NO. 438 to SEQ ID NO. 7090.

[0033] In various embodiments, an siRNA comprising a sense region and an antisense region is provided, said sense region and said antisense region together form a duplex region comprising 18-30 base pairs, and said sense region comprises a sequence that is identical to a contiguous stretch of at least 18 bases of a sequence selected from the group consisting of SEQ ID NO. 438 to SEQ ID NO. 7090. In various embodiments, the duplex region is 19-30 base pairs, and the sense region comprises a sequence that is identical to a sequence selected from the group consisting of SEQ ID NO. 438 to SEQ ID NO. 7090.

[0034] In various embodiments, a pool of at least two siRNAs is provided, wherein said pool comprises a first siRNA and a second siRNA, said first siRNA comprising a duplex region of length 18-30 base pairs that has a first sense region that is at least 90% similar to 18 bases of a first sequence selected from the group consisting of SEQ ID NO. 438 to SEQ ID NO. 7090, and said second siRNA comprises a duplex region of length 18-30 base pairs that has a second sense region that is at least 90% similar to 18 bases of a second sequence selected from the group consisting of SEQ ID NO. 438 to SEQ ID NO. 7090, wherein said first sense region and said second sense region are not identical.

[0035] In various embodiments, the first sense region comprises a sequence that is identical to at least 18 bases of a sequence selected from the group consisting of SEQ ID NO. 438 to SEQ ID NO. 7090, and said second sense region comprises a sequence that is identical to at least 18 bases of a sequence selected from the group consisting of SEQ ID NO. 438 to SEQ ID NO. 7090. In various embodiments, the duplex of said first siRNA is 19-30 base pairs, and said first sense region comprises a sequence that is at least 90% similar to a sequence selected from the group consisting of SEQ ID NO. 438 to SEQ ID NO. 7090, and said duplex of said second siRNA is 19-30 base pairs and comprises a sequence that is at least 90% similar to a sequence selected from the group consisting of SEQ ID NO. 438 to SEQ ID NO. 7090.

[0036] In various embodiments, the duplex of said first siRNA is 19-30 base pairs and said first sense region comprises a sequence that is identical to at least 18 bases of a sequence selected from the group consisting of SEQ ID NO. 438 to SEQ ID NO. 7090, and said duplex of said second siRNA is 19-30 base pairs and said second region comprises a sequence that is identical to a sequence selected from the group consisting of SEQ ID NO. 438 to SEQ ID NO. 7090.

[0037] For a better understanding of the present invention together with other and further advantages and embodiments, reference is made to the following description taken in conjunction with the examples, the scope of which is set forth in the appended claims.

### BRIEF DESCRIPTION OF THE FIGURES

[0038] FIG. 1 shows a model for siRNA-RISC interactions. RISC has the ability to interact with either end of the siRNA or miRNA molecule. Following binding, the duplex is unwound, and the relevant target is identified, cleaved, and released.

[0039] FIG. 2 is a representation of the functionality of two hundred and seventy siRNA duplexes that were generated to target human cyclophilin, human diazepam-binding inhibitor (DB), and firefly luciferase.

[0040] FIG. 3a is a representation of the silencing effect of 30 siRNAs in three different cells lines, HEK293, DU145, and Hela. FIG. 3b shows the frequency of different functional groups (>95% silencing (black), >80% silencing (gray), >50% silencing (dark gray), and <50% silencing (white)) based on GC content. In cases where a given bar is absent from a particular GC percentage, no siRNA were identified for that particular group. FIG. 3c shows the frequency of different functional groups based on melting temperature (Tm).

[0041] FIG. 4 is a representation of a statistical analysis that revealed correlations between silencing and five sequence-related properties of siRNA: (A) an A at position 19 of the sense strand, (B) an A at position 3 of the sense strand, (C) a U at position 10 of the sense strand, (D) a base other than G at position 13 of the sense strand, and (E) a base other than C at position 19 of the sense strand. All variables were correlated with siRNA silencing of firefly luciferase and human cyclophilin. siRNAs satisfying the criterion are grouped on the left (Selected) while those that do not, are grouped on the right (Eliminated). Y-axis is “% Silencing of Control.” Each position on the X-axis represents a unique siRNA.

[0042] FIGS. 5A and 5B are representations of firefly luciferase and cyclophilin siRNA panels sorted according to functionality and predicted values using Formula VIII. The siRNA found within the circle represent those that have Formula VIII values (SMARTSCORES™, or siRNA rank) above zero. siRNA outside the indicated area have calculated Formula VIII values that are below zero. Y-axis is “Expression (% Control).” Each position on the X-axis represents a unique siRNA.

[0043] FIG. 6A is a representation of the average internal stability profile (AISP) derived from 270 siRNAs taken from three separate genes (cyclophilin B, DBI and firefly luciferase). Graphs represent AISP values of highly functional, functional, and non-functional siRNA. FIG. 6B is a comparison between the AISP of naturally derived GFP siRNA (filled squares) and the AISP of siRNA from cyclophilin B, DBI, and luciferase having >90% silencing properties (no fill) for the antisense strand. “DG” is the symbol for ΔG, free energy.

[0044] FIG. 7 is a histogram showing the differences in duplex functionality upon introduction of base pair mismatches. The X-axis shows the mismatch introduced in the siRNA and the position it is introduced (e.g., 8C>A reveals that position 8 (which normally has a C) has been changed to an A). The Y-axis is “% Silencing (Normalized to Control).” The samples on the X-axis represent siRNAs at 100 nM and are, reading from left to right: 1A to C, 1A to G, 1A to U; 2A to C, 2A to G, 2A to U; 3A to C, 3A to G, 3A to U; 4G to A, 4G to C; 4G to U; 5U to A, 5U to C, 5U to G; 6U to A, 6U to C, 6U to G; 7G to A, 7G to C, 7G to U; 8C to A, 8C to G, 8C to U; 9G to A, 9G to C, 9G to U; 10C to A, 10C to G, 10C to U; 11G to A, 11G to C, 11G to U; 12G to A, 12G to C, 12G to U; 13A to C, 13A to G, 13A to U; 14G to A, 14G to C, 14G to U; 15G to A, 15G to C, 15G to U; 16A to C, 16A to G, 16A to U; 17G to A, 17G to C, 17G to U; 18U to A, 18U to C, 18U to G; 19U to A, 19U to C, 19U to G; 20 wt; Control.

[0045] FIG. 8 is histogram that shows the effects of 5′sense and antisense strand modification with 2′-O-methylation on functionality.

[0046] FIG. 9 shows a graph of SMARTSCORES™, or siRNA rank, versus RNAi silencing values for more than 360 siRNA directed against 30 different genes. SiRNA to the right of the vertical bar represent those siRNA that have desirable SMARTSCORES™, or siRNA rank.

[0047] FIGS. 10A-E compare the RNAi of five different genes (SEAP, DBI, PLK, Firefly Luciferase, and Renilla Luciferase) by varying numbers of randomly selected siRNA and four rationally designed (SMART-selected) siRNA chosen using the algorithm described in Formula VIII. In addition, RNAi induced by a pool of the four SMART-selected siRNA is reported at two different concentrations (100 and 400 nM). 10F is a comparison between a pool of randomly selected EGFR siRNA (Pool 1) and a pool of SMART-selected EGFR siRNA (Pool 2). Pool 1, S1-S4 and Pool 2 S1-S4 represent the individual members that made up each respective pool. Note that numbers for random siRNAs represent the position of the 5′ end of the sense strand of the duplex. The Y-axis represents the % expression of the control(s). The X-axis is the percent expression of the control.

[0048] FIG. 11 shows the Western blot results from cells treated with siRNA directed against twelve different genes involved in the clathrin-dependent endocytosis pathway (CHC, Dynil, CALM, CLCa, CLCb, Eps15, Eps15R, Rab5a, Rab5b, Rab5c, β2 subunit of AP-2 and EEA.1). siRNA were selected using Formula VIII. “Pool” represents a mixture of duplexes 1-4. Total concentration of each siRNA in the pool is 25 nM. Total concentration=4×25=100 nM.

[0049] FIG. 12 is a representation of the gene silencing capabilities of rationally-selected siRNA directed against ten different genes (human and mouse cyclophilin, C-myc, human lamin A/C, QB (ubiquinol-cytochrome c reductase core protein 1), MEK1 and MEK2, ATE1 (arginyl-tRNA protein transferase), GAPDH, and Eg5). The Y-axis is the percent expression of the control. Numbers 1, 2, 3 and 4 represent individual rationally selected siRNA. “Pool” represents a mixture of the four individual siRNA.

[0050] FIG. 13 is the sequence of the top ten Bcl2 siRNAs as determined by Formula VIII. Sequences are listed 5′ to 3′.

[0051] FIG. 14 is the knockdown by the top ten Bcl2 siRNAs at 100 nM concentrations. The Y-axis represents the amount of expression relative to the non-specific (ns) and transfection mixture control.

[0052] FIG. 15 represents a functional walk where siRNA beginning on every other base pair of a region of the luciferase gene are tested for the ability to silence the luciferase gene. The Y-axis represents the percent expression relative to a control. The X-axis represents the position of each individual siRNA. Reading from left to right across the X-axis, the position designations are 1, 3, 5, 7, 9, 11, 13, 15, 17, 19, 21, 23, 25, 27, 29, 31, 33, 35, 37, 39, 41, 43, 45, 47, 49, 51, 53, 55, 57, 59, 61, 63, 65, 67, 69, 71, 73, 75, 77, 79, 81, 83, 85, 87, 89, and Plasmid.

[0053] FIGS. 16A and 16B are histograms demonstrating the inhibition of target gene expression by pools of 2 (16A) and 3 (16B) siRNA duplexes taken from the walk described in FIG. 15. The Y-axis in each represents the percent expression relative to control. The X-axis in each represents the position of the first siRNA in paired pools, or trios of siRNAs. For instance, the first paired pool contains siRNAs 1 and 3. The second paired pool contains siRNAs 3 and 5. Pool 3 (of paired pools) contains siRNAs 5 and 7, and so on. For each of 16A and 16B, the X-axis from left to right reads 1, 3, 5, 7, 9, 11, 13, 15, 17, 19, 21, 23, 25, 27, 29, 31, 33, 35, 37, 39, 41, 43, 45, 47, 49, 51, 53, 55, 57, 59, 61, 63, 65, 67, 69, 71, 73, 75, 77, 79, 81, 83, 85, 87, 89, and Plasmid.

[0054] FIGS. 17A and 17B are histograms demonstrating the inhibition of target gene expression by pools of 4 (17A) and 5 (17B) siRNA duplexes. The Y-axis in each represents the percent expression relative to control. The X-axis in each represents the position of the first siRNA in each pool. For each of 17A and 17B, the X-axis from left to right reads 1, 3, 5, 7, 9, 11, 13, 15, 17, 19, 21, 23, 25, 27, 29, 31, 33, 35, 37, 39, 41, 43, 45, 47, 49, 51, 53, 55, 57, 59, 61, 63, 65, 67, 69, 71, 73, 75, 77, 79, 81, 83, 85, 87, 89, and Plasmid.

[0055] FIGS. 18A and 18B are histograms demonstrating the inhibition of target gene expression by siRNAs that are ten (18A) and twenty (18B) base pairs base pairs apart. The Y-axis represents the percent expression relative to a control. The X-axis represents the position of the first siRNA in each pool. For each of 18A and 18B, the X-axis from left to right reads 1, 3, 5, 7, 9, 11, 13, 15, 17, 19, 21, 23, 25, 27, 29, 31, 33, 35, 37, 39, 41, 43, 45, 47, 49, 51, 53, 55, 57, 59, 61, 63, 65, 67, 69, 71, 73, 75, 77, 79, 81, 83, 85, 87, 89, and Plasmid.

[0056] FIG. 19 shows that pools of siRNAs (dark gray bar) work as well (or better) than the best siRNA in the pool (light gray bar). The Y-axis represents the percent expression relative to a control. The X-axis represents the position of the first siRNA in each pool. The X-axis from left to right reads 1, 3, 5, 7, 9, 11, 13, 15, 17, 19, 21, 23, 25, 27, 29, 31, 33, 35, 37, 39, 41, 43, 45, 47, 49, 51, 53, 55, 57, 59, 61, 63, 65, 67, 69, 71, 73, 75, 77, 79, 81, 83, 85, 87, 89, and Plasmid.

[0057] FIG. 20 shows that the combination of several semifunctional siRNAs (dark gray) result in a significant improvement of gene expression inhibition over individual (semi-functional; light gray) siRNA. The Y-axis represents the percent expression relative to a control.

[0058] FIGS. 21A, 21B and 21C show both pools (Library, Lib) and individual siRNAs in inhibition of gene expression of Beta-Galactosidase, Renilla Luciferase and SEAP (alkaline phosphatase). Numbers on the X-axis indicate the position of the 5′-most nucleotide of the sense strand of the duplex. The Y-axis represents the percent expression of each gene relative to a control. Libraries contain 19 nucleotide long siRNAs (not including overhangs) that begin at the following nucleotides: SEAP: Lib 1: 206, 766, 812, 923, Lib 2: 1117, 1280, 1300, 1487, Lib 3: 206, 766, 812, 923, 1117, 1280, 1300, 1487, Lib 4: 206, 812, 1117, 1300, Lib 5: 766, 923, 1280, 1487, Lib 6: 206, 1487; Bgal: Lib 1: 979, 1339, 2029, 2590, Lib 2: 1087, 1783, 2399, 3257, Lib 3: 979, 1783, 2590, 3257, Lib 4: 979, 1087, 1339, 1783, 2029, 2399, 2590, 3257, Lib 5: 979, 1087, 1339, 1783, Lib 6: 2029, 2399, 2590, 3257; Renilla: Lib 1: 174, 300, 432, 568, Lib 2: 592, 633, 729, 867, Lib 3: 174, 300, 432, 568, 592, 633, 729, 867, Lib 4: 174, 432, 592, 729, Lib 5: 300, 568, 633, 867, Lib 6: 592, 568.

[0059] FIG. 22 shows the results of an EGFR and TfnR internalization assay when single gene knockdowns are performed. The Y-axis represents percent internalization relative to control.

[0060] FIG. 23 shows the results of an EGFR and TfnR internalization assay when multiple genes are knocked down (e.g., Rab5a, b, c). The Y-axis represents the percent internalization relative to control.

[0061] FIG. 24 shows the simultaneous knockdown of four different genes. siRNAs directed against G6PD, GAPDH, PLK, and UQC were simultaneously introduced into cells. Twenty-four hours later, cultures were harvested and assayed for mRNA target levels for each of the four genes. A comparison is made between cells transfected with individual siRNAs vs. a pool of siRNAs directed against all four genes.

[0062] FIG. 25 shows the functionality of ten siRNAs at 0.3 nM concentrations.

### DETAILED DESCRIPTION

### Definitions

[0063] Unless stated otherwise, the following terms and phrases have the meanings provided below:

### Complementary

[0064] The term “complementary” refers to the ability of polynucleotides to form base pairs with one another. Base pairs are typically formed by hydrogen bonds between nucleotide units in antiparallel polynucleotide strands. Complementary polynucleotide strands can base pair in the Watson-Crick manner (e.g., A to T, A to U, C to G), or in any other manner that allows for the formation of duplexes. As persons skilled in the art are aware, when using RNA as opposed to DNA, uracil rather than thymine is the base that is considered to be complementary to adenosine. However, when a U is denoted in the context of the present invention, the ability to substitute a T is implied, unless otherwise stated.

[0065] Perfect complementarity or 100% complementarity refers to the situation in which each nucleotide unit of one polynucleotide strand can hydrogen bond with a nucleotide unit of a second polynucleotide strand. Less than perfect complementarity refers to the situation in which some, but not all, nucleotide units of two strands can hydrogen bond with each other. For example, for two 20-mers, if only two base pairs on each strand can hydrogen bond with each other, the polynucleotide strands exhibit 10% complementarity. In the same example, if 18 base pairs on each strand can hydrogen bond with each other, the polynucleotide strands exhibit 90% complementarity.

### Deoxynucleotide

[0066] The term “deoxynucleotide” refers to a nucleotide or polynucleotide lacking a hydroxyl group (OH group) at the 2′ and/or 3′ position of a sugar moiety. Instead, it has a hydrogen bonded to the 2′ and/or 3′ carbon. Within an RNA molecule that comprises one or more deoxynucleotides, “deoxynucleotide” refers to the lack of an OH group at the 2′ position of the sugar moiety, having instead a hydrogen bonded directly to the 2′ carbon.

### Deoxyribonucleotide

[0067] The terms “deoxyribonucleotide” and “DNA” refer to a nucleotide or polynucleotide comprising at least one sugar moiety that has an H, rather than an OH, at its 2′ and/or 3′position.

### Duplex Region

[0068] The phrase “duplex region” refers to the region in two complementary or substantially complementary polynucleotides that form base pairs with one another, either by Watson-Crick base pairing or any other manner that allows for a stabilized duplex between polynucleotide strands that are complementary or substantially complementary. For example, a polynucleotide strand having 21 nucleotide units can base pair with another polynucleotide of 21 nucleotide units, yet only 19 bases on each strand are complementary or substantially complementary, such that the “duplex region” has 19 base pairs. The remaining bases may, for example, exist as 5′ and 3′ overhangs. Further, within the duplex region, 100% complementarity is not required; substantial complementarity is allowable within a duplex region. Substantial complementarity refers to 79% or greater complementarity. For example, a mismatch in a duplex region consisting of 19 base pairs results in 94.7% complementarity, rendering the duplex region substantially complementary.

### Filters

[0069] The term “filter” refers to one or more procedures that are performed on sequences that are identified by the algorithm. In some instances, filtering includes in silico procedures where sequences identified by the algorithm can be screened to identify duplexes carrying desirable or undesirable motifs. Sequences carrying such motifs can be selected for, or selected against, to obtain a final set with the preferred properties. In other instances, filtering includes wet lab experiments. For instance, sequences identified by one or more versions of the algorithm can be screened using any one of a number of procedures to identify duplexes that have hyperfunctional traits (e.g., they exhibit a high degree of silencing at subnanomolar concentrations and/or exhibit high degrees of silencing longevity).

### Gene Silencing

[0070] The phrase “gene silencing” refers to a process by which the expression of a specific gene product is lessened or attenuated. Gene silencing can take place by a variety of pathways. Unless specified otherwise, as used herein, gene silencing refers to decreases in gene product expression that results from RNA interference (RNAi), a defined, though partially characterized pathway whereby small inhibitory RNA (siRNA) act in concert with host proteins (e.g., the RNA induced silencing complex, RISC) to degrade messenger RNA (mRNA) in a sequence-dependent fashion. The level of gene silencing can be measured by a variety of means, including, but not limited to, measurement of transcript levels by Northern Blot Analysis, B-DNA techniques, transcription-sensitive reporter constructs, expression profiling (e.g., DNA chips), and related technologies. Alternatively, the level of silencing can be measured by assessing the level of the protein encoded by a specific gene. This can be accomplished by performing a number of studies including Western Analysis, measuring the levels of expression of a reporter protein that has e.g., fluorescent properties (e.g., GFP) or enzymatic activity (e.g., alkaline phosphatases), or several other procedures.

miRNA

[0071] The term “miRNA” refers to microRNA.

### Nucleotide

[0072] The term “nucleotide” refers to a ribonucleotide or a deoxyribonucleotide or modified form thereof, as well as an analog thereof. Nucleotides include species that comprise purines, e.g., adenine, hypoxanthine, guanine, and their derivatives and analogs, as well as pyrimidines, e.g., cytosine, uracil, thymine, and their derivatives and analogs.

[0073] Nucleotide analogs include nucleotides having modifications in the chemical structure of the base, sugar and/or phosphate, including, but not limited to, 5-position pyrimidine modifications, 8-position purine modifications, modifications at cytosine exocyclic amines, and substitution of 5-bromo-uracil; and 2′-position sugar modifications, including but not limited to, sugar-modified ribonucleotides in which the 2′-OH is replaced by a group such as an H, OR, R, halo, SH, SR, NH₂, NHR, NR₂, or CN, wherein R is an alkyl moiety. Nucleotide analogs are also meant to include nucleotides with bases such as inosine, queuosine, xanthine, sugars such as 2′-methyl ribose, non-natural phosphodiester linkages such as methylphosphonates, phosphorothioates and peptides.

[0074] Modified bases refer to nucleotide bases such as, for example, adenine, guanine, cytosine, thymine, uracil, xanthine, inosine, and queuosine that have been modified by the replacement or addition of one or more atoms or groups. Some examples of types of modifications that can comprise nucleotides that are modified with respect to the base moieties include but are not limited to, alkylated, halogenated, thiolated, aminated, amidated, or acetylated bases, individually or in combination. More specific examples include, for example, 5-propynyluridine, 5-propynylcytidine, 6-methyladenine, 6-methylguanine, N,N,-dimethyladenine, 2-propyladenine, 2-propylguanine, 2-aminoadenine, 1-methylinosine, 3-methyluridine, 5-methylcytidine, 5-methyluridine and other nucleotides having a modification at the 5 position, 5-(2-amino)propyl uridine, 5-halocytidine, 5-halouridine, 4-acetylcytidine, 1-methyladenosine, 2-methyladenosine, 3-methylcytidine, 6-methyluridine, 2-methylguanosine, 7-methylguanosine, 2,2-dimethylguanosine, 5-methylaminoethyluridine, 5-methyloxyuridine, deazanucleotides such as 7-deaza-adenosine, 6-azouridine, 6-azocytidine, 6-azothymidine, 5-methyl-2-thiouridine, other thio bases such as 2-thiouridine and 4-thiouridine and 2-thiocytidine, dihydrouridine, pseudouridine, queuosine, archaeosine, naphthyl and substituted naphthyl groups, any O- and N-alkylated purines and pyrimidines such as N6-methyladenosine, 5-methylcarbonylmethyluridine, uridine 5-oxyacetic acid, pyridine-4-one, pyridine-2-one, phenyl and modified phenyl groups such as aminophenol or 2,4,6-trimethoxy benzene, modified cytosines that act as G-clamp nucleotides, 8-substituted adenines and guanines, 5-substituted uracils and thymines, azapyrimidines, carboxyhydroxyalkyl nucleotides, carboxyalkylaminoalkyl nucleotides, and alkylcarbonylalkylated nucleotides. Modified nucleotides also include those nucleotides that are modified with respect to the sugar moiety, as well as nucleotides having sugars or analogs thereof that are not ribosyl. For example, the sugar moieties may be, or be based on, mannoses, arabinoses, glucopyranoses, galactopyranoses, 4′-thioribose, and other sugars, heterocycles, or carbocycles.

[0075] The term nucleotide is also meant to include what are known in the art as universal bases. By way of example, universal bases include but are not limited to 3-nitropyrrole, 5-nitroindole, or nebularine. The term “nucleotide” is also meant to include the N3′ to P5′ phosphoramidate, resulting from the substitution of a ribosyl 3′ oxygen with an amine group.

[0076] Further, the term nucleotide also includes those species that have a detectable label, such as for example a radioactive or fluorescent moiety, or mass label attached to the nucleotide.

### Off-Target Silencing and Off-Target Interference

[0077] The phrases “off-target silencing” and “off-target interference” are defined as degradation of mRNA other than the intended target mRNA due to overlapping and/or partial homology with secondary mRNA messages.

### Polynucleotide

[0078] The term “polynucleotide” refers to polymers of nucleotides, and includes but is not limited to DNA, RNA, DNA/RNA hybrids including polynucleotide chains of regularly and/or irregularly alternating deoxyribosyl moieties and ribosyl moieties (i.e., wherein alternate nucleotide units have an —OH, then and —H, then an —OH, then an —H, and so on at the 2′ position of a sugar moiety), and modifications of these kinds of polynucleotides, wherein the attachment of various entities or moieties to the nucleotide units at any position are included.

### Polyribonucleotide

[0079] The term “polyribonucleotide” refers to a polynucleotide comprising two or more modified or unmodified ribonucleotides and/or their analogs. The term “polyribonucleotide” is used interchangeably with the term “oligoribonucleotide.”

### Ribonucleotide and Ribonucleic Acid

[0080] The term “ribonucleotide” and the phrase “ribonucleic acid” (RNA), refer to a modified or unmodified nucleotide or polynucleotide comprising at least one ribonucleotide unit. A ribonucleotide unit comprises an hydroxyl group attached to the 2′ position of a ribosyl moiety that has a nitrogenous base attached in N-glycosidic linkage at the 1′ position of a ribosyl moiety, and a moiety that either allows for linkage to another nucleotide or precludes linkage.

siRNA

[0081] The term “siRNA” refers to small inhibitory RNA duplexes that induce the RNA interference (RNAi) pathway. These molecules can vary in length (generally 18-30 base pairs) and contain varying degrees of complementarity to their target mRNA in the antisense strand. Some, but not all, siRNA have unpaired overhanging bases on the 5′ or 3′ end of the sense strand and/or the antisense strand. The term “siRNA” includes duplexes of two separate strands, as well as single strands that can form hairpin structures comprising a duplex region.

[0082] siRNA may be divided into five (5) groups (non-functional, semi-functional, functional, highly functional, and hyper-functional) based on the level or degree of silencing that they induce in cultured cell lines. As used herein, these definitions are based on a set of conditions where the siRNA is transfected into said cell line at a concentration of 100 nM and the level of silencing is tested at a time of roughly 24 hours after transfection, and not exceeding 72 hours after transfection. In this context, “non-functional siRNA” are defined as those siRNA that induce less than 50% (<50%) target silencing. “Semi-functional siRNA” induce 50-79% target silencing. “Functional siRNA” are molecules that induce 80-95% gene silencing. “Highly-functional siRNA” are molecules that induce greater than 95% gene silencing. “Hyperfunctional siRNA” are a special class of molecules. For purposes of this document, hyperfunctional siRNA are defined as those molecules that: (1) induce greater than 95% silencing of a specific target when they are transfected at subnanomolar concentrations (i.e., less than one nanomolar); and/or (2) induce functional (or better) levels of silencing for greater than 96 hours. These relative functionalities (though not intended to be absolutes) may be used to compare siRNAs to a particular target for applications such as functional genomics, target identification and therapeutics.

SMARTSCORE™, or siRNA Rank

[0083] The term “SMARTSCORE™”, or “siRNA rank” refers to a number determined by applying any of the formulas to a given siRNA sequence. The term “SMART-selected” or “rationally selected” or “rational selection” refers to siRNA that have been selected on the basis of their SMARTSCORES™, or siRNA ranking.

### Substantially Similar

[0084] The phrase “substantially similar” refers to a similarity of at least 90% with respect to the identity of the bases of the sequence.

### Target

[0085] The term “target” is used in a variety of different forms throughout this document and is defined by the context in which it is used. “Target mRNA” refers to a messenger RNA to which a given siRNA can be directed against. “Target sequence” and “target site” refer to a sequence within the mRNA to which the sense strand of an siRNA shows varying degrees of homology and the antisense strand exhibits varying degrees of complementarity. The phrase “siRNA target” can refer to the gene, mRNA, or protein against which an siRNA is directed. Similarly, “target silencing” can refer to the state of a gene, or the corresponding mRNA or protein.

### Transfection

[0086] The term “transfection” refers to a process by which agents are introduced into a cell. The list of agents that can be transfected is large and includes, but is not limited to, siRNA, sense and/or anti-sense sequences, DNA encoding one or more genes and organized into an expression plasmid, proteins, protein fragments, and more. There are multiple methods for transfecting agents into a cell including, but not limited to, electroporation, calcium phosphate-based transfections, DEAE-dextran-based transfections, lipid-based transfections, molecular conjugate-based transfections (e.g., polylysine-DNA conjugates), microinjection and others.

[0087] The present invention is directed to improving the efficiency of gene silencing by siRNA. Through the inclusion of multiple siRNA sequences that are targeted to a particular gene and/or selecting an siRNA sequence based on certain defined criteria, improved efficiency may be achieved.

[0088] The present invention will now be described in connection with preferred embodiments. These embodiments are presented in order to aid in an understanding of the present invention and are not intended, and should not be construed, to limit the invention in any way. All alternatives, modifications and equivalents that may become apparent to those of ordinary skill upon reading this disclosure are included within the spirit and scope of the present invention.

[0089] Furthermore, this disclosure is not a primer on RNA interference. Basic concepts known to persons skilled in the art have not been set forth in detail.

[0090] The present invention is directed to increasing the efficiency of RNAi, particularly in mammalian systems. Accordingly, the present invention provides kits, siRNAs and methods for increasing siRNA efficacy.

[0091] According to a first embodiment, the present invention provides a kit for gene silencing, wherein said kit is comprised of a pool of at least two siRNA duplexes, each of which is comprised of a sequence that is complementary to a portion of the sequence of one or more target messenger RNA, and each of which is selected using non-target specific criteria. Each of the at least two siRNA duplexes of the kit complementary to a portion of the sequence of one or more target mRNAs is preferably selected using Formula X.

[0092] According to a second embodiment, the present invention provides a method for selecting an siRNA, said method comprising applying selection criteria to a set of potential siRNA that comprise 18-30 base pairs, wherein said selection criteria are non-target specific criteria, and said set comprises at least two siRNAs and each of said at least two siRNAs contains a sequence that is at least substantially complementary to a target gene; and determining the relative functionality of the at least two siRNAs.

[0093] In one embodiment, the present invention also provides a method wherein said selection criteria are embodied in a formula comprising:

(−14)*G₁₃−13*A₁−12*U₇−11*U₂−10*A₁₁−10*U₄−10*C₃−10*C₅−10*C₆−9*A₁₀−

9*U₉−9*C₁₈−8*G₁₀−7*U₁−7*U₁₆−7*C₁₇−7*C₁₉+7*U₁₇+8*A₂+8*A₄+8*A₅+8*C₄

+9*G₈+10*A₇+10*U₁₈+11*A₁₉+11*C₉+15*G₁+18*A₃+19*U₁₀−Tm−3*(GCₜₒₜₐₗ)

−6*(GC₁₅₋₁₉)−30*X; or Formula VIII

(−8)*A1+(−1)*A2+(12)*A3+(7)*A4+(18)*A5+(12)*A6+

(19)*A7+(6)*A8+(−4)*A9+(−5)*A10+(−2)*A11+(−5)*A12+(17)*A13+(−

3)*A14+(4)*A15+(2)*A16+(8)*A17+(11)*A18+(30)*A19+(−13)*U1+(−

10)*U2+(2)*U3+(−2)*U4+(−5)*U5+(5)*U6+(−2)*U7+(−10)*U8+(−

5)*U9+(15)*U10+(−1)*U11+(0)*U12+(10)*U13+(−9)*U14+(−13)*U15+(−

10)*U16+(3)*U17+(9)*U18+(9)*U19+(7)*C1+(3)*C2+(−21)*C3+(5)*C4+(−

9)*C5+(−20)*C6+(−18)*C7+(−5)*C8+(5)*C9+(1)*C10+(2)*C11+(−

5)*C12+(−3)*C13+(−6)*C14+(−2)*C15+(−5)*C16+(−3)*C17+(−12)*C18+(−

18)*C19+(14)*G1+(8)*G2+(7)*G3+(−10)*G4+(−

4)*G5+(2)*G6+(1)*G7+(9)*G8+(5)*G9+(−11)*G10+(1)*G11+(9)*G12+(−

24)*G13+(18)*G14+(11)*G15+(13)*G16+(−7)*G17+(−9)*G18+(−22)*G19+

6*(number of A+U in position 15-19)−3*(number of G+C in whole

siRNA), Formula X

[0094] wherein position numbering begins at the 5′-most position of a sense strand, and

[0095] A₁=1 if A is the base at position 1 of the sense strand, otherwise its value is 0;

[0096] A₂=1 if A is the base at position 2 of the sense strand, otherwise its value is 0;

[0097] A₃=1 if A is the base at position 3 of the sense strand, otherwise its value is 0;

[0098] A₄=1 if A is the base at position 4 of the sense strand, otherwise its value is 0;

[0099] A₅=1 if A is the base at position 5 of the sense strand, otherwise its value is 0;

[0100] A₆=1 if A is the base at position 6 of the sense strand, otherwise its value is 0;

[0101] A₇=1 if A is the base at position 7 of the sense strand, otherwise its value is 0;

[0102] A₁₀=1 if A is the base at position 10 of the sense strand, otherwise its value is 0;

[0103] A₁₁=1 if A is the base at position 11 of the sense strand, otherwise its value is 0;

[0104] A₁₃=1 if A is the base at position 13 of the sense strand, otherwise its value is 0;

[0105] A₁₉=1 if A is the base at position 19 of the sense strand, otherwise if another base is present or the sense strand is only 18 base pairs in length, its value is 0;

[0106] C₃=1 if C is the base at position 3 of the sense strand, otherwise its value is 0;

[0107] C₄=1 if C is the base at position 4 of the sense strand, otherwise its value is 0;

[0108] C₅=1 if C is the base at position 5 of the sense strand, otherwise its value is 0;

[0109] C₆=1 if C is the base at position 6 of the sense strand, otherwise its value is 0;

[0110] C₇=1 if C is the base at position 7 of the sense strand, otherwise its value is 0;

[0111] C₉=1 if C is the base at position 9 of the sense strand, otherwise its value is 0;

[0112] C₁₇=1 if C is the base at position 17 of the sense strand, otherwise its value is 0;

[0113] C₁₈=1 if C is the base at position 18 of the sense strand, otherwise its value is 0;

[0114] C₁₉=1 if C is the base at position 19 of the sense strand, otherwise if another base is present or the sense strand is only 18 base pairs in length, its value is 0;

[0115] G₁=1 if G is the base at position 1 on the sense strand, otherwise its value is 0;

[0116] G₂=1 if G is the base at position 2 of the sense strand, otherwise its value is 0;

[0117] G₈=1 if G is the base at position 8 on the sense strand, otherwise its value is 0;

[0118] G₁₀=1 if G is the base at position 10 on the sense strand, otherwise its value is 0;

[0119] G₁₃=1 if G is the base at position 13 on the sense strand, otherwise its value is 0;

[0120] G₁₉=1 if G is the base at position 19 of the sense strand, otherwise if another base is present or the sense strand is only 18 base pairs in length, its value is 0;

[0121] U₁=1 if U is the base at position 1 on the sense strand, otherwise its value is 0;

[0122] U₂=1 if U is the base at position 2 on the sense strand, otherwise its value is 0;

[0123] U₃=1 if U is the base at position 3 on the sense strand, otherwise its value is 0;

[0124] U₄=1 if U is the base at position 4 on the sense strand, otherwise its value is 0;

[0125] U₇=1 if U is the base at position 7 on the sense strand, otherwise its value is 0;

[0126] U₉=1 if U is the base at position 9 on the sense strand, otherwise its value is 0;

[0127] U₁₀=1 if U is the base at position 10 on the sense strand, otherwise its value is 0;

[0128] U₁₅=1 if U is the base at position 15 on the sense strand, otherwise its value is 0;

[0129] U₁₆=1 if U is the base at position 16 on the sense strand, otherwise its value is 0;

[0130] U₁₇=1 if U is the base at position 17 on the sense strand, otherwise its value is 0;

[0131] U₁₈=1 if U is the base at position 18 on the sense strand, otherwise its value is 0.

[0132] GC₁₅₋₁₉=the number of G and C bases within positions 15-19 of the sense strand, or within positions 15-18 if the sense strand is only 18 base pairs in length;

[0133] GCₜₒₜₐₗ=the number of G and C bases in the sense strand;

[0134] Tm=100 if the siRNA oligo has the internal repeat longer then 4 base pairs, otherwise its value is 0; and

[0135] X=the number of times that the same nucleotide repeats four or more times in a row.

[0136] Any of the methods of selecting siRNA in accordance with the invention can further comprise comparing the internal stability profiles of the siRNAs to be selected, and selecting those siRNAs with the most favorable internal stability profiles. Any of the methods of selecting siRNA can further comprise selecting either for or against sequences that contain motifs that induce cellular stress. Such motifs include, for example, toxicity motifs. Any of the methods of selecting siRNA can further comprise either selecting for or selecting against sequences that comprise stability motifs.

[0137] In another embodiment, the present invention provides a method of gene silencing, comprising introducing into a cell at least one siRNA selected according to any of the methods of the present invention. The siRNA can be introduced by allowing passive uptake of siRNA, or through the use of a vector.

[0138] According to a third embodiment, the invention provides a method for developing an algorithm for selecting siRNA, said method comprising: (a) selecting a set of siRNA; (b) measuring gene silencing ability of each siRNA from said set; (c) determining relative functionality of each siRNA; (d) determining improved functionality by the presence or absence of at least one variable selected from the group consisting of the presence or absence of a particular nucleotide at a particular position, the total number of As and Us in positions 15-19, the number of times that the same nucleotide repeats within a given sequence, and the total number of Gs and Cs; and (e) developing an algorithm using the information of step (d).

[0139] In another embodiment, the invention provides a method for selecting an siRNA with improved functionality, comprising using the above-mentioned algorithm to identify an siRNA of improved functionality.

[0140] According to a fourth embodiment, the present invention provides a kit, wherein said kit is comprised of at least two siRNAs, wherein said at least two siRNAs comprise a first optimized siRNA and a second optimized siRNA, wherein said first optimized siRNA and said second optimized siRNA are optimized according a formula comprising Formula X.

[0141] According to a fifth embodiment, the present invention provides a method for identifying a hyperfunctional siRNA, comprising applying selection criteria to a set of potential siRNA that comprise 18-30 base pairs, wherein said selection criteria are non-target specific criteria, and said set comprises at least two siRNAs and each of said at least two siRNAs contains a sequence that is at least substantially complementary to a target gene; determining the relative functionality of the at least two siRNAs and assigning each of the at least two siRNAs a functionality score; and selecting siRNAs from the at least two siRNAs that have a functionality score that reflects greater than 80 percent silencing at a concentration in the picomolar range, wherein said greater than 80 percent silencing endures for greater than 120 hours.

[0142] In other embodiments, the invention provides kits and/or methods wherein the siRNA are comprised of two separate polynucleotide strands; wherein the siRNA are comprised of a single contiguous molecule such as, for example, a unimolecular siRNA (comprising, for example, either a nucleotide or non-nucleotide loop); wherein the siRNA are expressed from one or more vectors; and wherein two or more genes are silenced by a single administration of siRNA.

[0143] According to a sixth embodiment, the present invention provides a hyperfunctional siRNA that is capable of silencing Bcl2.

[0144] According to a seventh embodiment, the present invention provides a method for developing an siRNA algorithm for selecting functional and hyperfunctional siRNAs for a given sequence. The method comprises:

[0145] (a) selecting a set of siRNAs;

[0146] (b) measuring the gene silencing ability of each siRNA from said set;

[0147] (c) determining the relative functionality of each siRNA;

[0148] (d) determining the amount of improved functionality by the presence or absence of at least one variable selected from the group consisting of the total GC content, melting temperature of the siRNA, GC content at positions 15-19, the presence or absence of a particular nucleotide at a particular position, relative thermodynamic stability at particular positions in a duplex, and the number of times that the same nucleotide repeats within a given sequence; and

[0149] (e) developing an algorithm using the information of step (d).

[0150] According to this embodiment, preferably the set of siRNAs comprises at least 90 siRNAs from at least one gene, more preferably at least 180 siRNAs from at least two different genes, and most preferably at least 270 and 360 siRNAs from at least three and four different genes, respectively. Additionally, in step (d) the determination is made with preferably at least two, more preferably at least three, even more preferably at least four, and most preferably all of the variables. The resulting algorithm is not target sequence specific.

[0151] In another embodiment, the present invention provides rationally designed siRNAs identified using the formulas above.

[0152] In yet another embodiment, the present invention is directed to hyperfunctional siRNA.

[0153] The ability to use the above algorithms, which are not sequence or species specific, allows for the cost-effective selection of optimized siRNAs for specific target sequences. Accordingly, there will be both greater efficiency and reliability in the use of siRNA technologies.

[0154] The methods disclosed herein can be used in conjunction with comparing internal stability profiles of selected siRNAs, and designing an siRNA with a desirable internal stability profile; and/or in conjunction with a selection either for or against sequences that contain motifs that induce cellular stress, for example, cellular toxicity.

[0155] Any of the methods disclosed herein can be used to silence one or more genes by introducing an siRNA selected, or designed, in accordance with any of the methods disclosed herein. The siRNA(s) can be introduced into the cell by any method known in the art, including passive uptake or through the use of one or more vectors.

[0156] Any of the methods and kits disclosed herein can employ either unimolecular siRNAs, siRNAs comprised of two separate polynucleotide strands, or combinations thereof. Any of the methods disclosed herein can be used in gene silencing, where two or more genes are silenced by a single administration of siRNA(s). The siRNA(s) can be directed against two or more target genes, and administered in a single dose or single transfection, as the case may be.

Optimizing siRNA

[0157] According to one embodiment, the present invention provides a method for improving the effectiveness of gene silencing for use to silence a particular gene through the selection of an optimal siRNA. An siRNA selected according to this method may be used individually, or in conjunction with the first embodiment, i.e., with one or more other siRNAs, each of which may or may not be selected by this criteria in order to maximize their efficiency.

[0158] The degree to which it is possible to select an siRNA for a given mRNA that maximizes these criteria will depend on the sequence of the mRNA itself. However, the selection criteria will be independent of the target sequence. According to this method, an siRNA is selected for a given gene by using a rational design. That said, rational design can be described in a variety of ways. Rational design is, in simplest terms, the application of a proven set of criteria that enhance the probability of identifying a functional or hyperfunctional siRNA. In one method, rationally designed siRNA can be identified by maximizing one or more of the following criteria:

[0159] (1) A low GC content, preferably between about 30-52%.

[0160] (2) At least 2, preferably at least 3 A or U bases at positions 15-19 of the siRNA on the sense strand.

[0161] (3) An A base at position 19 of the sense strand.

[0162] (4) An A base at position 3 of the sense strand.

[0163] (5) A U base at position 10 of the sense strand.

[0164] (6) An A base at position 14 of the sense strand.

[0165] (7) A base other than C at position 19 of the sense strand.

[0166] (8) A base other than G at position 13 of the sense strand.

[0167] (9) A Tm, which refers to the character of the internal repeat that results in inter- or intramolecular structures for one strand of the duplex, that is preferably not stable at greater than 50° C., more preferably not stable at greater than 37° C., even more preferably not stable at greater than 30° C. and most preferably not stable at greater than 20° C.

[0168] (10) A base other than U at position 5 of the sense strand.

[0169] (11) A base other than A at position 11 of the sense strand.

[0170] (12) A base other than an A at position 1 of the sense strand.

[0171] (13) A base other than an A at position 2 of the sense strand.

[0172] (14) An A base at position 4 of the sense strand.

[0173] (15) An A base at position 5 of the sense strand.

[0174] (16) An A base at position 6 of the sense strand.

[0175] (17) An A base at position 7 of the sense strand.

[0176] (18) An A base at position 8 of the sense strand.

[0177] (19) A base other than an A at position 9 of the sense strand.

[0178] (20) A base other than an A at position 10 of the sense strand.

[0179] (21) A base other than an A at position 11 of the sense strand.

[0180] (22) A base other than an A at position 12 of the sense strand.

[0181] (23) An A base at position 13 of the sense strand.

[0182] (24) A base other than an A at position 14 of the sense strand.

[0183] (25) An A base at position 15 of the sense strand

[0184] (26) An A base at position 16 of the sense strand.

[0185] (27) An A base at position 17 of the sense strand.

[0186] (28) An A base at position 18 of the sense strand.

[0187] (29) A base other than a U at position 1 of the sense strand.

[0188] (30) A base other than a U at position 2 of the sense strand.

[0189] (31) A U base at position 3 of the sense strand.

[0190] (32) A base other than a U at position 4 of the sense strand.

[0191] (33) A base other than a U at position 5 of the sense strand.

[0192] (34) A U base at position 6 of the sense strand.

[0193] (35) A base other than a U at position 7 of the sense strand.

[0194] (36) A base other than a U at position 8 of the sense strand.

[0195] (37) A base other than a U at position 9 of the sense strand.

[0196] (38) A base other than a U at position 1 of the sense strand.

[0197] (39) A U base at position 13 of the sense strand.

[0198] (40) A base other than a U at position 14 of the sense strand.

[0199] (41) A base other than a U at position 15 of the sense strand.

[0200] (42) A base other than a U at position 16 of the sense strand.

[0201] (43) A U base at position 17 of the sense strand.

[0202] (44) A U base at position 18 of the sense strand.

[0203] (45) A U base at position 19 of the sense strand.

[0204] (46) A C base at position 1 of the sense strand.

[0205] (47) A C base at position 2 of the sense strand.

[0206] (48) A base other than a C at position 3 of the sense strand.

[0207] (49) A C base at position 4 of the sense strand.

[0208] (50) A base other than a C at position 5 of the sense strand.

[0209] (51) A base other than a C at position 6 of the sense strand.

[0210] (52) A base other than a C at position 7 of the sense strand.

[0211] (53) A base other than a C at position 8 of the sense strand.

[0212] (54) A C base at position 9 of the sense strand.

[0213] (55) A C base at position 10 of the sense strand.

[0214] (56) A C base at position 11 of the sense strand.

[0215] (57) A base other than a C at position 12 of the sense strand.

[0216] (58) A base other than a C at position 13 of the sense strand.

[0217] (59) A base other than a C at position 14 of the sense strand.

[0218] (60) A base other than a C at position 15 of the sense strand.

[0219] (61) A base other than a C at position 16 of the sense strand.

[0220] (62) A base other than a C at position 17 of the sense strand.

[0221] (63) A base other than a C at position 18 of the sense strand.

[0222] (64) A G base at position 1 of the sense strand.

[0223] (65) A G base at position 2 of the sense strand.

[0224] (66) A G base at position 3 of the sense strand.

[0225] (67) A base other than a G at position 4 of the sense strand.

[0226] (68) A base other than a G at position 5 of the sense strand.

[0227] (69) A G base at position 6 of the sense strand.

[0228] (70) A G base at position 7 of the sense strand.

[0229] (71) A G base at position 8 of the sense strand.

[0230] (72) A G base at position 9 of the sense strand.

[0231] (73) A base other than a G at position 10 of the sense strand.

[0232] (74) A G base at position 11 of the sense strand.

[0233] (75) A G base at position 12 of the sense strand.

[0234] (76) A G base at position 14 of the sense strand.

[0235] (77) A G base at position 15 of the sense strand.

[0236] (78) A G base at position 16 of the sense strand.

[0237] (79) A base other than a G at position 17 of the sense strand.

[0238] (80) A base other than a G at position 18 of the sense strand.

[0239] (81) A base other than a G at position 19 of the sense strand.

[0240] The importance of various criteria can vary greatly. For instance, a C base at position 10 of the sense strand makes a minor contribution to duplex functionality. In contrast, the absence of a C at position 3 of the sense strand is very important. Accordingly, preferably an siRNA will satisfy as many of the aforementioned criteria as possible.

[0241] With respect to the criteria, GC content, as well as a high number of AU in positions 15-19 of the sense strand, may be important for easement of the unwinding of double stranded siRNA duplex. Duplex unwinding has been shown to be crucial for siRNA functionality in vivo.

[0242] With respect to criterion 9, the internal structure is measured in terms of the melting temperature of the single strand of siRNA, which is the temperature at which 50% of the molecules will become denatured. With respect to criteria 2-8 and 10-11, the positions refer to sequence positions on the sense strand, which is the strand that is identical to the mRNA.

[0243] In one preferred embodiment, at least criteria 1 and 8 are satisfied. In another preferred embodiment, at least criteria 7 and 8 are satisfied. In still another preferred embodiment, at least criteria 1, 8 and 9 are satisfied.

[0244] It should be noted that all of the aforementioned criteria regarding sequence position specifics are with respect to the 5′ end of the sense strand. Reference is made to the sense strand, because most databases contain information that describes the information of the mRNA. Because according to the present invention a chain can be from 18 to 30 bases in length, and the aforementioned criteria assumes a chain 19 base pairs in length, it is important to keep the aforementioned criteria applicable to the correct bases.

[0245] When there are only 18 bases, the base pair that is not present is the base pair that is located at the 3′ of the sense strand. When there are twenty to thirty bases present, then additional bases are added at the 5′ end of the sense chain and occupy positions ⁻1 to ⁻11. Accordingly, with respect to SEQ. ID NO. 0001 NNANANNNNUCNAANNNNA and SEQ. ID NO. 0028 GUCNNANANNNNUCNAANNNNA, both would have A at position 3, A at position 5, U at position 10, C at position 11, A and position 13, A and position 14 and A at position 19. However, SEQ. ID NO. 0028 would also have C at position −1, U at position −2 and G at position −3.

[0246] For a 19 base pair siRNA, an optimal sequence of one of the strands may be represented below, where N is any base, A, C, G, or U:

| | |
|---|---|
| NNANANNNNUCNAANNNNA. | SEQ. ID NO. 0001 |
| NNANANNNNUGNAANNNNA. | SEQ. ID NO. 0002 |
| NNANANNNNUUNAANNNNA. | SEQ. ID NO. 0003 |
| NNANANNNNUCNCANNNNA. | SEQ. ID NO. 0004 |
| NNANANNNNUGNCANNNNA. | SEQ. ID NO. 0005 |
| NNANANNNNUUNCANNNNA. | SEQ. ID NO. 0006 |
| NNANANNNNUCNUANNNNA. | SEQ. ID NO. 0007 |
| NNANANNNNUGNUANNNNA. | SEQ. ID NO. 0008 |
| NNANANNNNUUNUANNNNA. | SEQ. ID NO. 0009 |
| NNANCNNNNUCNAANNNNA. | SEQ. ID NO. 0010 |
| NNANCNNNNUGNAANNNNA. | SEQ. ID NO. 0011 |
| NNANCNNNNUUNAANNNNA. | SEQ. ID NO. 0012 |
| NNANCNNNNUCNCANNNNA. | SEQ. ID NO. 0013 |
| NNANCNNNNUGNCANNNNA. | SEQ. ID NO. 0014 |
| NNANCNNNNUUNCANNNNA. | SEQ. ID NO. 0015 |
| NNANCNNNNUCNUANNNNA. | SEQ. ID NO. 0016 |
| NNANCNNNNUGNUANNNNA. | SEQ. ID NO. 0017 |
| NNANCNNNNUUNUANNNNA. | SEQ. ID NO. 0018 |
| NNANGNNNNUCNAANNNNA. | SEQ. ID NO. 0019 |
| NNANGNNNNUGNAANNNNA. | SEQ. ID NO. 0020 |
| NNANGNNNNUUNAANNNNA. | SEQ. ID NO. 0021 |
| NNANGNNNNUCNCANNNNA. | SEQ. ID NO. 0022 |
| NNANGNNNNUGNCANNNNA. | SEQ. ID NO. 0023 |
| NNANGNNNNUUNCANNNNA. | SEQ. ID NO. 0024 |
| NNANGNNNNUCNUANNNNA. | SEQ. ID NO. 0025 |
| NNANGNNNNUGNUANNNNA. | SEQ. ID NO. 0026 |
| NNANGNNNNNUNUANNNNA. | SEQ. ID NO. 0027 |

[0247] In one embodiment, the sequence used as an siRNA is selected by choosing the siRNA that score highest according to one of the following seven algorithms that are represented by Formulas I-VII:

Relative functionality of siRNA=−(GC/3)+(AU₁₅₋₁₉)−(Tm_{20°C})*3−(G₁₃)*3−(C₁₉)+(A₁₉)*2+(A₃)+(U₁₀)+(A₁₄)−(U₅)−(A₁₁) Formula I

Relative functionality of siRNA=−(GC/3)−(AU₁₅₋₁₉)*3−(G₁₃)*3−(C₁₉)+(A₁₉)*2+(A₃) Formula II

Relative functionality of siRNA=−(GC/3)+(AU₁₅₋₁₉)−(Tm_{20°C})*3 Formula III

Relative functionality of siRNA=−GC/2+(AU₁₅₋₁₉)/2−(Tm_{20°C})*2−(G₁₃)*3−(C₁₉)+(A₁₉)*2+(A₃)+(U₁₀)+(A₁₄)−(U₅)−(A₁₁) Formula IV

Relative functionality of siRNA=−(G₁₃)*3−(C₁₉)+(A₁₉)*2+(A₃)+(U₁₀)+(A₁₄)−(U₅)−(A₁₁) Formula V

Relative functionality of siRNA=−(G₁₃)*3−(C₁₉)+(A₁₉)*2+(A₃) Formula VI

Relative functionality of siRNA=−(GC/2)+(AU₁₅₋₁₉)/2−(Tm_{20°C})*1−(G₁₃)*3−(C₁₉)+(A₁₉)*3+(A₃)*3+(U₁₀)/2+(A₁₄)/2−(U₅)/2−(A₁₁)/2 Formula VII

[0248] In Formulas I-VII:

[0249] wherein A₁₉=1 if A is the base at position 19 on the sense strand, otherwise its value is 0,

[0250] AU₁₅₋₁₉=0-5 depending on the number of A or U bases on the sense strand at positions 15-19;

[0251] G₁₃=1 if G is the base at position 13 on the sense strand, otherwise its value is 0;

[0252] C₁₉=1 if C is the base at position 19 of the sense strand, otherwise its value is 0;

[0253] GC=the number of G and C bases in the entire sense strand;

[0254] Tm_{20°C}=1 if the Tm is greater than 20° C.;

[0255] A₃=1 if A is the base at position 3 on the sense strand, otherwise its value is 0;

[0256] U₁₀=1 if U is the base at position 10 on the sense strand, otherwise its value is 0;

[0257] A₁₄=1 if A is the base at position 14 on the sense strand, otherwise its value is 0;

[0258] U₅=1 if U is the base at position 5 on the sense strand, otherwise its value is 0; and

[0259] A₁₁=1 if A is the base at position 11 of the sense strand, otherwise its value is 0.

[0260] Formulas I-VII provide relative information regarding functionality. When the values for two sequences are compared for a given formula, the relative functionality is ascertained; a higher positive number indicates a greater functionality. For example, in many applications a value of 5 or greater is beneficial.

[0261] Additionally, in many applications, more than one of these formulas would provide useful information as to the relative functionality of potential siRNA sequences. However, it is beneficial to have more than one type of formula, because not every formula will be able to help to differentiate among potential siRNA sequences. For example, in particularly high GC mRNAs, formulas that take that parameter into account would not be useful and application of formulas that lack GC elements (e.g., formulas V and VI) might provide greater insights into duplex functionality. Similarly, formula II might by used in situations where hairpin structures are not observed in duplexes, and formula IV might be applicable for sequences that have higher AU content. Thus, one may consider a particular sequence in light of more than one or even all of these algorithms to obtain the best differentiation among sequences. In some instances, application of a given algorithm may identify an unusually large number of potential siRNA sequences, and in those cases, it may be appropriate to re-analyze that sequence with a second algorithm that is, for instance, more stringent. Alternatively, it is conceivable that analysis of a sequence with a given formula yields no acceptable siRNA sequences (i.e. low SMARTSCORES™, or siRNA ranking). In this instance, it may be appropriate to re-analyze that sequences with a second algorithm that is, for instance, less stringent. In still other instances, analysis of a single sequence with two separate formulas may give rise to conflicting results (i.e. one formula generates a set of siRNA with high SMARTSCORES™, or siRNA ranking, while the other formula identifies a set of siRNA with low SMARTSCORES™, or siRNA ranking). In these instances, it may be necessary to determine which weighted factor(s) (e.g. GC content) are contributing to the discrepancy and assessing the sequence to decide whether these factors should or should not be included. Alternatively, the sequence could be analyzed by a third, fourth, or fifth algorithm to identify a set of rationally designed siRNA.

[0262] The above-referenced criteria are particularly advantageous when used in combination with pooling techniques as depicted in Table I:

TABLE I
FUNCTIONAL PROBABILITY

| | OLIGOS | | | POOLS | | |
|---|---|---|---|---|---|---|
| CRITERIA | >95% | >80% | <70% | >95% | >80% | <70% |
| CURRENT | 33.0 | 50.0 | 23.0 | 79.5 | 97.3 | 0.3 |
| NEW | 50.0 | 88.5 | 8.0 | 93.8 | 99.98 | 0.005 |
| (GC) | 28.0 | 58.9 | 36.0 | 72.8 | 97.1 | 1.6 |

[0263] The term “current” used in Table I refers to Tuschl's conventional siRNA parameters (Elbashir, S. M. et al. (2002) “Analysis of gene function in somatic mammalian cells using small interfering RNAs” Methods 26: 199-213). “New” refers to the design parameters described in Formulas I-VII. “GC” refers to criteria that select siRNA solely on the basis of GC content.

[0264] As Table I indicates, when more functional siRNA duplexes are chosen, siRNAs that produce <70% silencing drops from 23% to 8% and the number of siRNA duplexes that produce >80% silencing rises from 50% to 88.5%. Further, of the siRNA duplexes with >80% silencing, a larger portion of these siRNAs actually silence >95% of the target expression (the new criteria increases the portion from 33% to 50%). Using this new criteria in pooled siRNAs, shows that, with pooling, the amount of silencing >95% increases from 79.5% to 93.8% and essentially eliminates any siRNA pool from silencing less than 70%.

[0265] Table II similarly shows the particularly beneficial results of pooling in combination with the aforementioned criteria. However, Table II, which takes into account each of the aforementioned variables, demonstrates even a greater degree of improvement in functionality.

TABLE II
FUNCTIONAL PROBABILITY

| | OLIGOS | | | POOLS | | |
|---|---|---|---|---|---|---|
| | | | NON- | | | NON- |
| | FUNCTIONAL | AVERAGE | FUNCTIONAL | FUNCTIONAL | AVERAGE | FUNCTIONAL |
| RANDOM | 20 | 40 | 50 | 67 | 97 | 3 |
| CRITERIA 1 | 52 | 99 | 0.1 | 97 | 93 | 0.0040 |
| CRITERIA 4 | 89 | 99 | 0.1 | 99 | 99 | 0.0000 |

[0266] The terms “functional,” “Average,” and “Non-functional” used in Table II, refer to siRNA that exhibit >80%, >50%, and <50% functionality, respectively. Criteria 1 and 4 refer to specific criteria described above.

[0267] The above-described algorithms may be used with or without a computer program that allows for the inputting of the sequence of the mRNA and automatically outputs the optimal siRNA. The computer program may, for example, be accessible from a local terminal or personal computer, over an internal network or over the Internet.

[0268] In addition to the formulas above, more detailed algorithms, may be used for selecting siRNA. Preferably, at least one RNA duplex of 18-30 base pairs is selected such that it is optimized according a formula selected from:

(−14)*G₁₃−13*A₁−12*U₇−11*U₂−10*A₁₁−10*U₄−10*C₃−10*C₅−10*C₆−9*A₁₀−

9*U₉−9*C₁₈−8*G₁₀−7*U₁−7*U₁₆−7*C₁₇−7*C₁₉+7*U₁₇+8*A₂+8*A₄+8*A₅+8*C₄

+9*G₈+10*A₇+10*U₁₈+11*A₁₉+11*C₉+15*G₁+18*A₃+19*U₁₀−Tm−3*(GCₜₒₜₐₗ)

−6*(GC₁₅₋₁₉)−30*X; and Formula VIII

(14.1)*A₃+(14.9)*A₆+(17.6)*A₁₃+(24.7)*A₁₉+(14.2)*U₁₀+(10.5)*

C₉+(23.9)*G₁+(16.3)*G₂+(−12.3)*A₁₁+(−19.3)*U₁+(−12.1)*U₂+(−

11)*U₃+(−15.2)*U₁₅+(−11.3)*U₁₆+(−11.8)*C₃+(−17.4)*C₆+(−10.5)*C₇+

(−13.7)*G₁₃+(−25.9)*G₁₉−Tm−3*(GCₜₒₜₐₗ)−6*(GC₁₅₋₁₉)−30*X; and Formula IX

(−8)*A1+(−1)*A2+(12)*A3+(7)*A4+(18)*A5+(12)*A6+

(19)*A7+(6)*A8+(−4)*A9+(−5)*A10+(−2)*A11+(−5)*A12+(17)*A13+(−

3)*A14+(4)*A15+(2)*A16+(8)*A17+(11)*A18+(30)*A19+(−13)*U1+(−

10)*U2+(2)*U3+(−2)*U4+(−5)*U5+(5)*U6+(−2)*U7+(−10)*U8+(−

5)*U9+(15)*U10+(−1)*U11+(0)*U12+(10)*U13+(−9)*U14+(−13)*U15+(−

10)*U16+(3)*U17+(9)*U18+(9)*U19+(7)*C1+(3)*C2+(−21)*C3+(5)*C4+(−

9)*C5+(−20)*C6+(−18)*C7+(−5)*C8+(5)*C9+(1)*C10+(2)*C11+(−

5)*C12+(−3)*C13+(−6)*C14+(−2)*C15+(−5)*C16+(−3)*C17+(−12)*C18+(−

18)*C19+(14)*G1+(8)*G2+(7)*G3+(−10)*G4+(−

4)*G5+(2)*G6+(1)*G7+(9)*G8+(5)*G9+(−11)*G10+(1)*G11+(9)*G12+(−

24)*G13+(18)*G14+(11)*G15+(13)*G16+(−7)*G17+(−9)*G18+(−22)*G19+

6*(number of A+U in position 15-19)−3*(number of G+C in whole

siRNA). Formula X

[0269] wherein

[0270] A₁=1 if A is the base at position 1 of the sense strand, otherwise its value is 0;

[0271] A₂=1 if A is the base at position 2 of the sense strand, otherwise its value is 0;

[0272] A₃=1 if A is the base at position 3 of the sense strand, otherwise its value is 0;

[0273] A₄=1 if A is the base at position 4 of the sense strand, otherwise its value is 0;

[0274] A₅=1 if A is the base at position 5 of the sense strand, otherwise its value is 0;

[0275] A₆=1 if A is the base at position 6 of the sense strand, otherwise its value is 0;

[0276] A₇=1 if A is the base at position 7 of the sense strand, otherwise its value is 0;

[0277] A₁₀=1 if A is the base at position 10 of the sense strand, otherwise its value is 0;

[0278] A₁₁=1 if A is the base at position 11 of the sense strand, otherwise its value is 0;

[0279] A₁₃=1 if A is the base at position 13 of the sense strand, otherwise its value is 0;

[0280] A₁₉=1 if A is the base at position 19 of the sense strand, otherwise if another base is present or the sense strand is only 18 base pairs in length, its value is 0;

[0281] C₃=1 if C is the base at position 3 of the sense strand, otherwise its value is 0;

[0282] C₄=1 if C is the base at position 4 of the sense strand, otherwise its value is 0;

[0283] C₅=1 if C is the base at position 5 of the sense strand, otherwise its value is 0;

[0284] C₆=1 if C is the base at position 6 of the sense strand, otherwise its value is 0;

[0285] C₇=1 if C is the base at position 7 of the sense strand, otherwise its value is 0;

[0286] C₉=1 if C is the base at position 9 of the sense strand, otherwise its value is 0;

[0287] C₁₇=1 if C is the base at position 17 of the sense strand, otherwise its value is 0;

[0288] C₁₈=1 if C is the base at position 18 of the sense strand, otherwise its value is 0;

[0289] C₁₉=1 if C is the base at position 19 of the sense strand, otherwise if another base is present or the sense strand is only 18 base pairs in length, its value is 0;

[0290] G₁=1 if G is the base at position 1 on the sense strand, otherwise its value is 0;

[0291] G₂=1 if G is the base at position 2 of the sense strand, otherwise its value is 0;

[0292] G₈=1 if G is the base at position 8 on the sense strand, otherwise its value is 0;

[0293] G₁₀=1 if G is the base at position 10 on the sense strand, otherwise its value is 0;

[0294] G₁₃=1 if G is the base at position 13 on the sense strand, otherwise its value is 0;

[0295] G₁₉=1 if G is the base at position 19 of the sense strand, otherwise if another base is present or the sense strand is only 18 base pairs in length, its value is 0;

[0296] U₁=1 if U is the base at position 1 on the sense strand, otherwise its value is 0;

[0297] U₂=1 if U is the base at position 2 on the sense strand, otherwise its value is 0;

[0298] U₃=1 if U is the base at position 3 on the sense strand, otherwise its value is 0;

[0299] U₄=1 if U is the base at position 4 on the sense strand, otherwise its value is 0;

[0300] U₇=1 if U is the base at position 7 on the sense strand, otherwise its value is 0;

[0301] U₉=1 if U is the base at position 9 on the sense strand, otherwise its value is 0;

[0302] U₁₀=1 if U is the base at position 10 on the sense strand, otherwise its value is 0;

[0303] U₁₅=1 if U is the base at position 15 on the sense strand, otherwise its value is 0;

[0304] U₁₆=1 if U is the base at position 16 on the sense strand, otherwise its value is 0;

[0305] U₁₇=1 if U is the base at position 17 on the sense strand, otherwise its value is 0;

[0306] U₁₈=1 if U is the base at position 18 on the sense strand, otherwise its value is 0;

[0307] GC₁₅₋₁₉=the number of G and C bases within positions 15-19 of the sense strand, or within positions 15-18 if the sense strand is only 18 base pairs in length;

[0308] GCₜₒₜₐₗ=the number of G and C bases in the sense strand;

[0309] Tm=100 if the siRNA oligo has the internal repeat longer then 4 base pairs, otherwise its value is 0; and

[0310] X=the number of times that the same nucleotide repeats four or more times in a row.

[0311] The above formulas VIII, IX, and X, as well as formulas I-VII, provide methods for selecting siRNA in order to increase the efficiency of gene silencing. A subset of variables of any of the formulas may be used, though when fewer variables are used, the optimization hierarchy becomes less reliable.

[0312] With respect to the variables of the above-referenced formulas, a single letter of A or C or G or U followed by a subscript refers to a binary condition. The binary condition is that either the particular base is present at that particular position (wherein the value is “1”) or the base is not present (wherein the value is “0”). Because position 19 is optional, i.e., there might be only 18 base pairs, when there are only 18 base pairs, any base with a subscript of 19 in the formulas above would have a zero value for that parameter. Before or after each variable is a number followed by *, which indicates that the value of the variable is to be multiplied or weighed by that number.

[0313] The numbers preceding the variables A, or G, or C, or U in Formulas VIII, IX, and X (or after the variables in Formula I-VII) were determined by comparing the difference in the frequency of individual bases at different positions in functional siRNA and total siRNA. Specifically, the frequency in which a given base was observed at a particular position in functional groups was compared with the frequency that that same base was observed in the total, randomly selected siRNA set. If the absolute value of the difference between the functional and total values was found to be greater than 6%, that parameter was included in the equation. Thus, for instance, if the frequency of finding a “G” at position 13 (G₁₃) is found to be 6% in a given functional group, and the frequency of G₁₃ in the total population of siRNAs is 20%, the difference between the two values is 6%-20%-14%. As the absolute value is greater than six (6), this factor (−14) is included in the equation. Thus, in Formula VIII, in cases where the siRNA under study has a G in position 13, the accrued value is (−14)*(1)=−14. In contrast, when a base other than G is found at position 13, the accrued value is (−14)*(0)=0.

[0314] When developing a means to optimize siRNAs, the inventors observed that a bias toward low internal thermodynamic stability of the duplex at the 5′-antisense (AS) end is characteristic of naturally occurring miRNA precursors. The inventors extended this observation to siRNAs for which functionality had been assessed in tissue culture.

[0315] With respect to the parameter GC₁₅₋₁₉, a value of 0-5 will be ascribed depending on the number of G or C bases at positions 15 to 19. If there are only 18 base pairs, the value is between 0 and 4.

[0316] With respect to the criterion GCₜₒₜₐₗ content, a number from 0-30 will be ascribed, which correlates to the total number of G and C nucleotides on the sense strand, excluding overhangs. Without wishing to be bound by any one theory, it is postulated that the significance of the GC content (as well as AU content at positions 15-19, which is a parameter for formulas III-VII) relates to the easement of the unwinding of a double-stranded siRNA duplex. Duplex unwinding is believed to be crucial for siRNA functionality in vivo and overall low internal stability, especially low internal stability of the first unwound base pair is believed to be important to maintain sufficient processivity of RISC complex-induced duplex unwinding. If the duplex has 19 base pairs, those at positions 15-19 on the sense strand will unwind first if the molecule exhibits a sufficiently low internal stability at that position. As persons skilled in the art are aware, RISC is a complex of approximately twelve proteins; Dicer is one, but not the only, helicase within this complex. Accordingly, although the GC parameters are believed to relate to activity with Dicer, they are also important for activity with other RISC proteins.

[0317] The value of the parameter Tm is 0 when there are no internal repeats longer than (or equal to) four base pairs present in the siRNA duplex; otherwise the value is 1. Thus for example, if the sequence ACGUACGU, or any other four nucleotide (or more) palindrome exists within the structure, the value will be one (1). Alternatively if the structure ACGGACG, or any other 3 nucleotide (or less) palindrome exists, the value will be zero (0).

[0318] The variable “X” refers to the number of times that the same nucleotide occurs contiguously in a stretch of four or more units. If there are, for example, four contiguous As in one part of the sequence and elsewhere in the sequence four contiguous Cs, X=2. Further, if there are two separate contiguous stretches of four of the same nucleotides or eight or more of the same nucleotides in a row, then X=2. However, X does not increase for five, six or seven contiguous nucleotides.

[0319] Again, when applying Formula VIII, Formula IX, or Formula X, to a given mRNA, (the “target RNA” or “target molecule”), one may use a computer program to evaluate the criteria for every sequence of 18-30 base pairs or only sequences of a fixed length, e.g., 19 base pairs. Preferably the computer program is designed such that it provides a report ranking of all of the potential siRNAs 18-30 base pairs, ranked according to which sequences generate the highest value. A higher value refers to a more efficient siRNA for a particular target gene. The computer program that may be used may be developed in any computer language that is known to be useful for scoring nucleotide sequences, or it may be developed with the assistance of commercially available product such as Microsoft's PRODUCT.NET. Additionally, rather than run every sequence through one and/or another formula, one may compare a subset of the sequences, which may be desirable if for example only a subset are available. For instance, it may be desirable to first perform a BLAST (Basic Local Alignment Search Tool) search and to identify sequences that have no homology to other targets. Alternatively, it may be desirable to scan the sequence and to identify regions of moderate GC context, then perform relevant calculations using one of the above-described formulas on these regions. These calculations can be done manually or with the aid of a computer.

[0320] As with Formulas I-VII, either Formula VIII, Formula IX, or Formula X may be used for a given mRNA target sequence. However, it is possible that according to one or the other formula more than one siRNA will have the same value. Accordingly, it is beneficial to have a second formula by which to differentiate sequences. Formulas IX and X were derived in a similar fashion as Formula VIII, yet used a larger data set and thus yields sequences with higher statistical correlations to highly functional duplexes. The sequence that has the highest value ascribed to it may be referred to as a “first optimized duplex.” The sequence that has the second highest value ascribed to it may be referred to as a “second optimized duplex.” Similarly, the sequences that have the third and fourth highest values ascribed to them may be referred to as a third optimized duplex and a fourth optimized duplex, respectively. When more than one sequence has the same value, each of them may, for example, be referred to as first optimized duplex sequences or co-first optimized duplexes. Formula X is similar to Formula IX, yet uses a greater numbers of variables and for that reason, identifies sequences on the basis of slightly different criteria.

[0321] It should also be noted that the output of a particular algorithm will depend on several of variables including: (1) the size of the data base(s) being analyzed by the algorithm, and (2) the number and stringency of the parameters being applied to screen each sequence. Thus, for example, in U.S. patent application Ser. No. 10/714,333, entitled “Functional and Hyperfunctional siRNA,” filed Nov. 14, 2003, Formula VIII was applied to the known human genome (NCBI REFSEQ database) through ENTREZ (EFETCH). As a result of these procedures, roughly 1.6 million siRNA sequences were identified. Application of Formula VIII to the same database in March of 2004 yielded roughly 2.2 million sequences, a difference of approximately 600,000 sequences resulting from the growth of the database over the course of the months that span this period of time. Application of other formulas (e.g., Formula X) that change the emphasis of, include, or eliminate different variables can yield unequal numbers of siRNAs. Alternatively, in cases where application of one formula to one or more genes fails to yield sufficient numbers of siRNAs with scores that would be indicative of strong silencing, said genes can be reassessed with a second algorithm that is, for instance, less stringent.

[0322] siRNA sequences identified using Formula VIII and Formula X (minus sequences generated by Formula VIII) are contained within the sequence listing. The data included in the sequence listing is described more fully below. The sequences identified by Formula VIII and Formula X that are disclosed in the sequence listing may be used in gene silencing applications.

[0323] It should be noted that for Formulas VIII, IX, and X all of the aforementioned criteria are identified as positions on the sense strand when oriented in the 5′ to 3′ direction as they are identified in connection with Formulas I-VII unless otherwise specified.

[0324] Formulas I-X, may be used to select or to evaluate one, or more than one, siRNA in order to optimize silencing. Preferably, at least two optimized siRNAs that have been selected according to at least one of these formulas are used to silence a gene, more preferably at least three and most preferably at least four. The siRNAs may be used individually or together in a pool or kit. Further, they may be applied to a cell simultaneously or separately. Preferably, the at least two siRNAs are applied simultaneously. Pools are particularly beneficial for many research applications. However, for therapeutics, it may be more desirable to employ a single hyperfunctional siRNA as described elsewhere in this application.

[0325] When planning to conduct gene silencing, and it is necessary to choose between two or more siRNAs, one should do so by comparing the relative values when the siRNA are subjected to one of the formulas above. In general a higher scored siRNA should be used.

[0326] Useful applications include, but are not limited to, target validation, gene functional analysis, research and drug discovery, gene therapy and therapeutics. Methods for using siRNA in these applications are well known to persons of skill in the art.

[0327] Because the ability of siRNA to function is dependent on the sequence of the RNA and not the species into which it is introduced, the present invention is applicable across a broad range of species, including but not limited to all mammalian species, such as humans, dogs, horses, cats, cows, mice, hamsters, chimpanzees and gorillas, as well as other species and organisms such as bacteria, viruses, insects, plants and C. elegans.

[0328] The present invention is also applicable for use for silencing a broad range of genes, including but not limited to the roughly 45,000 genes of a human genome, and has particular relevance in cases where those genes are associated with diseases such as diabetes, Alzheimer's, cancer, as well as all genes in the genomes of the aforementioned organisms.

[0329] The siRNA selected according to the aforementioned criteria or one of the aforementioned algorithms are also, for example, useful in the simultaneous screening and functional analysis of multiple genes and gene families using high throughput strategies, as well as in direct gene suppression or silencing.

### Development of the Algorithms

[0330] To identify siRNA sequence features that promote functionality and to quantify the importance of certain currently accepted conventional factors—such as G/C content and target site accessibility—the inventors synthesized an siRNA panel consisting of 270 siRNAs targeting three genes, Human Cyclophilin, Firefly Luciferase, and Human DBI. In all three cases, siRNAs were directed against specific regions of each gene. For Human Cyclophilin and Firefly Luciferase, ninety siRNAs were directed against a 199 bp segment of each respective mRNA. For DBI, 90 siRNAs were directed against a smaller, 109 base pair region of the mRNA. The sequences to which the siRNAs were directed are provided below.

[0331] It should be noted that in certain sequences, “t” is present. This is because many databases contain information in this manner. However, the t denotes a uracil residue in mRNA and siRNA. Any algorithm will, unless otherwise specified, process a t in a sequence as a u.

[0332] Human cyclophilin: 193-390, M60857

SEQ. ID NO. 29:
gttccaaaaa cagtggataa ttttgtggcc ttagctacag
gagagaaagg atttggctac aaaaacagca aattccatcg
tgtaatcaag gacttcatga tccagggcgg agacttcacc
aggggagatg gcacaggagg aaagagcatc tacggtgagc
gcttccccga tgagaacttc aaactgaagc actacgggcc
tggctggg

[0333] Firefly luciferase: 1434-1631, U47298 (pGL3, Promega)

SEQ. ID NO. 30:
tgaacttccc gccgccgttg ttgttttgga gcacggaaag
acgatgacgg aaaaagagat cgtggattac gtcgccagtc
aagtaacaac cgcgaaaaag ttgcgcggag gagttgtgtt
tgtggacgaa gtaccgaaag gtcttaccgg aaaactcgac
gcaagaaaaa tcagagagat cctcataaag gccaagaagg

[0334] DBI, NM_{—}020548 (202-310) (every position)

SEQ. ID NO. 0031:
acgggcaagg ccaagtggga tgcctggaat gagctgaaag
ggacttccaa ggaagatgcc atgaaagctt acatcaacaa
agtagaagag ctaaagaaaa aatacggg

[0335] A list of the siRNAs appears in Table III (see Examples Section, Example II)

[0336] The set of duplexes was analyzed to identify correlations between siRNA functionality and other biophysical or thermodynamic properties. When the siRNA panel was analyzed in functional and non-functional subgroups, certain nucleotides were much more abundant at certain positions in functional or non-functional groups. More specifically, the frequency of each nucleotide at each position in highly functional siRNA duplexes was compared with that of nonfunctional duplexes in order to assess the preference for or against any given nucleotide at every position. These analyses were used to determine important criteria to be included in the siRNA algorithms (Formulas VIII, IX, and X).

[0337] The data set was also analyzed for distinguishing biophysical properties of siRNAs in the functional group, such as optimal percent of GC content, propensity for internal structures and regional thermodynamic stability. Of the presented criteria, several are involved in duplex recognition, RISC activation/duplex unwinding, and target cleavage catalysis.

[0338] The original data set that was the source of the statistically derived criteria is shown in FIG. 2. Additionally, this figure shows that random selection yields siRNA duplexes with unpredictable and widely varying silencing potencies as measured in tissue culture using HEK293 cells. In the figure, duplexes are plotted such that each x-axis tick-mark represents an individual siRNA, with each subsequent siRNA differing in target position by two nucleotides for Human Cyclophilin B and Firefly Luciferase, and by one nucleotide for Human DBI. Furthermore, the y-axis denotes the level of target expression remaining after transfection of the duplex into cells and subsequent silencing of the target.

[0339] siRNA identified and optimized in this document work equally well in a wide range of cell types. FIG. 3a shows the evaluation of thirty siRNAs targeting the DBI gene in three cell lines derived from different tissues. Each DBI siRNA displays very similar functionality in HEK293 (ATCC, CRL-1573, human embryonic kidney), HeLa (ATCC, CCL-2, cervical epithelial adenocarcinoma) and DU145 (HTB-81, prostate) cells as determined by the B-DNA assay. Thus, siRNA functionality is determined by the primary sequence of the siRNA and not by the intracellular environment. Additionally, it should be noted that although the present invention provides for a determination of the functionality of siRNA for a given target, the same siRNA may silence more than one gene. For example, the complementary sequence of the silencing siRNA may be present in more than one gene. Accordingly, in these circumstances, it may be desirable not to use the siRNA with highest SMARTSCORE™, or siRNA ranking. In such circumstances, it may be desirable to use the siRNA with the next highest SMARTSCORE™, or siRNA ranking.

[0340] To determine the relevance of G/C content in siRNA function, the G/C content of each duplex in the panel was calculated and the functional classes of siRNAs (<F50, ≧F50, ≧F80, ≧F95 where F refers to the percent gene silencing) were sorted accordingly. The majority of the highly-functional siRNAs (≧F95) fell within the G/C content range of 36%-52% (FIG. 3B). Twice as many non-functional (<F50) duplexes fell within the high G/C content groups (>57% GC content) compared to the 36%-52% group. The group with extremely low GC content (26% or less) contained a higher proportion of non-functional siRNAs and no highly-functional siRNAs. The G/C content range of 30%-52% was therefore selected as Criterion I for siRNA functionality, consistent with the observation that a G/C range 30%-70% promotes efficient RNAi targeting. Application of this criterion alone provided only a marginal increase in the probability of selecting functional siRNAs from the panel: selection of F50 and F95 siRNAs was improved by 3.6% and 2.2%, respectively. The siRNA panel presented here permitted a more systematic analysis and quantification of the importance of this criterion than that used previously.

[0341] A relative measure of local internal stability is the A/U base pair (bp) content; therefore, the frequency of A/U bp was determined for each of the five terminal positions of the duplex (5′ sense (S)/5′ antisense (AS)) of all siRNAs in the panel. Duplexes were then categorized by the number of A/U bp in positions 1-5 and 15-19 of the sense strand. The thermodynamic flexibility of the duplex 5′-end (positions 1-5; S) did not appear to correlate appreciably with silencing potency, while that of the 3′-end (positions 15-19; S) correlated with efficient silencing. No duplexes lacking A/U bp in positions 15-19 were functional. The presence of one A/U bp in this region conferred some degree of functionality, but the presence of three or more A/Us was preferable and therefore defined as Criterion II. When applied to the test panel, only a marginal increase in the probability of functional siRNA selection was achieved: a 1.8% and 2.3% increase for F50 and F95 duplexes, respectively (Table IV).

[0342] The complementary strands of siRNAs that contain internal repeats or palindromes may form internal fold-back structures. These hairpin-like structures exist in equilibrium with the duplexed form effectively reducing the concentration of functional duplexes. The propensity to form internal hairpins and their relative stability can be estimated by predicted melting temperatures. High Tm reflects a tendency to form hairpin structures. Lower Tm values indicate a lesser tendency to form hairpins. When the functional classes of siRNAs were sorted by Tₘ (FIG. 3c), the following trends were identified: duplexes lacking stable internal repeats were the most potent silencers (no F95 duplex with predicted hairpin structure Tₘ>60° C.). In contrast, about 60% of the duplexes in the groups having internal hairpins with calculated Tₘ values less than 20° C. were F80. Thus, the stability of internal repeats is inversely proportional to the silencing effect and defines Criterion III (predicted hairpin structure Tₘ≦20° C.).

Sequence-Based Determinants of siRNA Functionality

[0343] When the siRNA panel was sorted into functional and non-functional groups, the frequency of a specific nucleotide at each position in a functional siRNA duplex was compared with that of a nonfunctional duplex in order to assess the preference for or against a certain nucleotide. FIG. 4 shows the results of these queries and the subsequent resorting of the data set (from FIG. 2). The data is separated into two sets: those duplexes that meet the criteria, a specific nucleotide in a certain position - grouped on the left (Selected) and those that do not—grouped on the right (Eliminated). The duplexes are further sorted from most functional to least functional with the y-axis of FIG. 4a-e representing the % expression i.e., the amount of silencing that is elicited by the duplex (Note: each position on the X-axis represents a different duplex). Statistical analysis revealed correlations between silencing and several sequence-related properties of siRNAs. FIG. 4 and Table IV show quantitative analysis for the following five sequence-related properties of siRNA: (A) an A at position 19 of the sense strand; (B) an A at position 3 of the sense strand; (C) a U at position 10 of the sense strand; (D) a base other than G at position 13 of the sense strand; and (E) a base other than C at position 19 of the sense strand.

[0344] When the siRNAs in the panel were evaluated for the presence of an A at position 19 of the sense strand, the percentage of non-functional duplexes decreased from 20% to 11.8%, and the percentage of F95 duplexes increased from 21.7% to 29.4% (Table IV). Thus, the presence of an A in this position defined Criterion IV.

[0345] Another sequence-related property correlated with silencing was the presence of an A in position 3 of the sense strand (FIG. 4b). Of the siRNAs with A3, 34.4% were F95, compared with 21.7% randomly selected siRNAs. The presence of a U base in position 10 of the sense strand exhibited an even greater impact (FIG. 4c). Of the duplexes in this group, 41.7% were F95. These properties became criteria V and VI, respectively.

[0346] Two negative sequence-related criteria that were identified also appear on FIG. 4. The absence of a G at position 13 of the sense strand, conferred a marginal increase in selecting functional duplexes (FIG. 4d). Similarly, lack of a C at position 19 of the sense strand also correlated with functionality (FIG. 4e). Thus, among functional duplexes, position 19 was most likely occupied by A, and rarely occupied by C. These rules were defined as criteria VII and VIII, respectively.

[0347] Application of each criterion individually provided marginal but statistically significant increases in the probability of selecting a potent siRNA. Although the results were informative, the inventors sought to maximize potency and therefore consider multiple criteria or parameters. Optimization is particularly important when developing therapeutics. Interestingly, the probability of selecting a functional siRNA based on each thermodynamic criteria was 2%-4% higher than random, but 4%-8% higher for the sequence-related determinates. Presumably, these sequence-related increases reflect the complexity of the RNAi mechanism and the multitude of protein-RNA interactions that are involved in RNAi-mediated silencing.

TABLE IV

| | | | | IMPROVEMENT |
|---|---|---|---|---|
| | | PERCENT | | OVER |
| CRITERION | | FUNCTIONAL | | RANDOM (%) |
| I. | 30%-52% G/C Content | <F50 | 16.4 | −3.6 |
| | | ≧F50 | 83.6 | 3.6 |
| | | ≧F80 | 60.4 | 4.3 |
| | | ≧F95 | 23.9 | 2.2 |
| II. | At least 3 A/U | <F50 | 18.2 | −1.8 |
| | bases at positions | ≧F50 | 81.8 | 1.8 |
| | 15-19 of the sense | ≧F80 | 59.7 | 3.6 |
| | strand | ≧F95 | 24.0 | 2.3 |
| III. | Absence of internal | <F50 | 16.7 | −3.3 |
| | repeats, as measured | ≧F50 | 83.3 | 3.3 |
| | by Tm of secondary | ≧F80 | 61.1 | 5.0 |
| | structure ≦20° C. | ≧F95 | 24.6 | 2.9 |
| IV. | An A base at | <F50 | 11.8 | −8.2 |
| | position 19 | ≧F50 | 88.2 | 8.2 |
| | of the sense strand | ≧F80 | 75.0 | 18.9 |
| | | ≧F95 | 29.4 | 7.7 |
| V. | An A base at | <F50 | 17.2 | −2.8 |
| | position 3 of | ≧F50 | 82.8 | 2.8 |
| | the sense strand | ≧F80 | 62.5 | 6.4 |
| | | ≧F95 | 34.4 | 12.7 |
| VI. | A U base at | <F50 | 13.9 | −6.1 |
| | position 10 of | ≧F50 | 86.1 | 6.1 |
| | the sense strand | ≧F80 | 69.4 | 13.3 |
| | | ≧F95 | 41.7 | 20 |
| VII. | A base other than | <F50 | 18.8 | −1.2 |
| | C at position 19 | ≧F50 | 81.2 | 1.2 |
| | of the sense strand | ≧F80 | 59.7 | 3.6 |
| | | ≧F95 | 24.2 | 2.5 |
| VIII. | A base other than | <F50 | 15.2 | −4.8 |
| | G at position 13 | ≧F50 | 84.8 | 4.8 |
| | of the sense strand | ≧F80 | 61.4 | 5.3 |
| | | ≧F95 | 26.5 | 4.8 |

The siRNA Selection Algorithm

[0348] In an effort to improve selection further, all identified criteria, including but not limited to those listed in Table IV were combined into the algorithms embodied in Formula VIII, Formula IX, and Formula X. Each siRNA was then assigned a score (referred to as a SMARTSCORE™, or siRNA ranking) according to the values derived from the formulas. Duplexes that scored higher than 0 or −20 (unadjusted), for Formulas VIII and IX, respectively, effectively selected a set of functional siRNAs and excluded all non-functional siRNAs. Conversely, all duplexes scoring lower than 0 and −20 (minus 20) according to formulas VIII and IX, respectively, contained some functional siRNAs but included all non-functional siRNAs. A graphical representation of this selection is shown in FIG. 5. It should be noted that the scores derived from the algorithm can also be provided as “adjusted” scores. To convert Formula VIII unadjusted scores into adjusted scores it is necessary to use the following equation:

(160+unadjusted score)/2.25

[0349] When this takes place, an unadjusted score of “0” (zero) is converted to 75. Similarly, unadjusted scores for Formula X can be converted to adjusted scores. In this instance, the following equation is applied:

(228+unadjusted score)/3.56

[0350] When these manipulations take place, an unadjusted score of 38 is converted to an adjusted score of 75.

[0351] The methods for obtaining the seven criteria embodied in Table IV are illustrative of the results of the process used to develop the information for Formulas VIII, IX, and X. Thus similar techniques were used to establish the other variables and their multipliers. As described above, basic statistical methods were use to determine the relative values for these multipliers.

[0352] To determine the value for “Improvement over Random” the difference in the frequency of a given attribute (e.g., GC content, base preference) at a particular position is determined between individual functional groups (e.g., <F50) and the total siRNA population studied (e.g., 270 siRNA molecules selected randomly). Thus, for instance, in Criterion I (30%-52% GC content) members of the <F50 group were observed to have GC contents between 30-52% in 16.4% of the cases. In contrast, the total group of 270 siRNAs had GC contents in this range, 20% of the time. Thus for this particular attribute, there is a small negative correlation between 30%-52% GC content and this functional group (i.e., 16.4%-20%=−3.6%). Similarly, for Criterion VI, (a “U” at position 10 of the sense strand), the >F95 group contained a “U” at this position 41.7% of the time. In contrast, the total group of 270 siRNAs had a “U” at this position 21.7% of the time, thus the improvement over random is calculated to be 20% (or 41.7%-21.7%).

Identifying the Average Internal Stability Profile of Strong siRNA

[0353] In order to identify an internal stability profile that is characteristic of strong siRNA, 270 different siRNAs derived from the cyclophilin B, the diazepam binding inhibitor (DBI), and the luciferase gene were individually transfected into HEK293 cells and tested for their ability to induce RNAi of the respective gene. Based on their performance in the in vivo assay, the sequences were then subdivided into three groups, (i) >95% silencing; (ii) 80-95% silencing; and (iii) less than 50% silencing. Sequences exhibiting 51-84% silencing were eliminated from further consideration to reduce the difficulties in identifying relevant thermodynamic patterns.

[0354] Following the division of siRNA into three groups, a statistical analysis was performed on each member of each group to determine the average internal stability profile (AISP) of the siRNA. To accomplish this the Oligo 5.0 Primer Analysis Software and other related statistical packages (e.g., Excel) were exploited to determine the internal stability of pentamers using the nearest neighbor method described by Freier et al., (1986) Improved free-energy parameters for predictions of RNA duplex stability, Proc Natl. Acad. Sci. USA 83(24): 9373-7. Values for each group at each position were then averaged, and the resulting data were graphed on a linear coordinate system with the Y-axis expressing the ΔG (free energy) values in kcal/mole and the X-axis identifying the position of the base relative to the 5′ end.

[0355] The results of the analysis identified multiple key regions in siRNA molecules that were critical for successful gene silencing. At the 3′-most end of the sense strand (5′antisense), highly functional siRNA (>95% gene silencing, see FIG. 6a, >F95) have a low internal stability (AISP of position 19=˜−7.6 kcal/mol). In contrast low-efficiency siRNA (i.e., those exhibiting less than 50% silencing, <F50) display a distinctly different profile, having high ΔG values (˜−8.4 kcal/mol) for the same position. Moving in a 5′ (sense strand) direction, the internal stability of highly efficient siRNA rises (position 12=˜−8.3 kcal/mole) and then drops again (position 7=˜−7.7 kcal/mol) before leveling off at a value of approximately −8.1 kcal/mol for the 5′ terminus. siRNA with poor silencing capabilities show a distinctly different profile. While the AISP value at position 12 is nearly identical with that of strong siRNAs, the values at positions 7 and 8 rise considerably, peaking at a high of ˜−9.0 kcal/mol. In addition, at the 5′ end of the molecule the AISP profile of strong and weak siRNA differ dramatically. Unlike the relatively strong values exhibited by siRNA in the >95% silencing group, siRNAs that exhibit poor silencing activity have weak AISP values (−7.6, −7.5, and −7.5 kcal/mol for positions 1, 2 and 3 respectively).

[0356] Overall the profiles of both strong and weak siRNAs form distinct sinusoidal shapes that are roughly 180° out-of-phase with each other. While these thermodynamic descriptions define the archetypal profile of a strong siRNA, it will likely be the case that neither the ΔG values given for key positions in the profile or the absolute position of the profile along the Y-axis (i.e., the ΔG-axis) are absolutes. Profiles that are shifted upward or downward (i.e., having on an average, higher or lower values at every position) but retain the relative shape and position of the profile along the X-axis can be foreseen as being equally effective as the model profile described here. Moreover, it is likely that siRNA that have strong or even stronger gene-specific silencing effects might have exaggerated ΔG values (either higher or lower) at key positions. Thus, for instance, it is possible that the 5′-most position of the sense strand (position 19) could have ΔG values of 7.4 kcal/mol or lower and still be a strong siRNA if, for instance, a G-C→G-T/U mismatch were substituted at position 19 and altered duplex stability. Similarly, position 12 and position 7 could have values above 8.3 kcal/mol and below 7.7 kcal/mole, respectively, without abating the silencing effectiveness of the molecule. Thus, for instance, at position 12, a stabilizing chemical modification (e.g., a chemical modification of the 2′ position of the sugar backbone) could be added that increases the average internal stability at that position. Similarly, at position 7, mismatches similar to those described previously could be introduced that would lower the ΔG values at that position.

[0357] Lastly, it is important to note that while functional and non-functional siRNA were originally defined as those molecules having specific silencing properties, both broader or more limiting parameters can be used to define these molecules. As used herein, unless otherwise specified, “non-functional siRNA” are defined as those siRNA that induce less than 50% (<50%) target silencing, “semi-functional siRNA” induce 50-79% target silencing, “functional siRNA” are molecules that induce 80-95% gene silencing, and “highly-functional siRNA” are molecules that induce great than 95% gene silencing. These definitions are not intended to be rigid and can vary depending upon the design and needs of the application. For instance, it is possible that a researcher attempting to map a gene to a chromosome using a functional assay, may identify an siRNA that reduces gene activity by only 30%. While this level of gene silencing may be “non-functional” for, e.g., therapeutic needs, it is sufficient for gene mapping purposes and is, under these uses and conditions, “functional.” For these reasons, functional siRNA can be defined as those molecules having greater than 10%, 20%, 30%, 40%, 50%, 60%, 70%, 80%, or 90% silencing capabilities at 100 nM transfection conditions. Similarly, depending upon the needs of the study and/or application, non-functional and semi-functional siRNA can be defined as having different parameters. For instance, semi-functional siRNA can be defined as being those molecules that induce 20%, 30%, 40%, 50%, 60%, or 70% silencing at 100 nM transfection conditions. Similarly, non-functional siRNA can be defined as being those molecules that silence gene expression by less than 70%, 60%, 50%, 40%, 30%, or less. Nonetheless, unless otherwise stated, the descriptions stated in the “Definitions” section of this text should be applied.

[0358] Functional attributes can be assigned to each of the key positions in the AISP of strong siRNA. The low 5′ (sense strand) AISP values of strong siRNAs may be necessary for determining which end of the molecule enters the RISC complex. In contrast, the high and low AISP values observed in the central regions of the molecule may be critical for siRNA-target mRNA interactions and product release, respectively.

[0359] If the AISP values described above accurately define the thermodynamic parameters of strong siRNA, it would be expected that similar patterns would be observed in strong siRNA isolated from nature. Natural siRNAs exist in a harsh, RNase-rich environment and it can be hypothesized that only those siRNA that exhibit heightened affinity for RISC (i.e., siRNA that exhibit an average internal stability profile similar to those observed in strong siRNA) would survive in an intracellular environment. This hypothesis was tested using GFP-specific siRNA isolated from N. benthamiana. Llave et al. (2002) Endogenous and Silencing-Associated Small RNAs in Plants, The Plant Cell 14, 1605-1619, introduced long double-stranded GFP-encoding RNA into plants and subsequently re-isolated GFP-specific siRNA from the tissues. The AISP of fifty-nine of these GFP-siRNA were determined, averaged, and subsequently plotted alongside the AISP profile obtained from the cyclophilin B/DBI/luciferase siRNA having >90% silencing properties (FIG. 6b). Comparison of the two groups show that profiles are nearly identical. This finding validates the information provided by the internal stability profiles and demonstrates that: (1) the profile identified by analysis of the cyclophilin B/DBI/luciferase siRNAs are not gene specific; and (2) AISP values can be used to search for strong siRNAs in a variety of species.

[0360] Both chemical modifications and base-pair mismatches can be incorporated into siRNA to alter the duplex's AISP and functionality. For instance, introduction of mismatches at positions 1 or 2 of the sense strand destabilized the 5′ end of the sense strand and increases the functionality of the molecule (see Luc, FIG. 7). Similarly, addition of 2′-O-methyl groups to positions 1 and 2 of the sense strand can also alter the AISP and (as a result) increase both the functionality of the molecule and eliminate off-target effects that results from sense strand homology with the unrelated targets (FIG. 8).

### Rationale for Criteria in a Biological Context

[0361] The fate of siRNA in the RNAi pathway may be described in 5 major steps: (1) duplex recognition and pre-RISC complex formation; (2) ATP-dependent duplex unwinding/strand selection and RISC activation; (3) mRNA target identification; (4) mRNA cleavage, and (5) product release (FIG. 1). Given the level of nucleic acid-protein interactions at each step, siRNA functionality is likely influenced by specific biophysical and molecular properties that promote efficient interactions within the context of the multi-component complexes. Indeed, the systematic analysis of the siRNA test set identified multiple factors that correlate well with functionality. When combined into a single algorithm, they proved to be very effective in selecting active siRNAs.

[0362] The factors described here may also be predictive of key functional associations important for each step in RNAi. For example, the potential formation of internal hairpin structures correlated negatively with siRNA functionality. Complementary strands with stable internal repeats are more likely to exist as stable hairpins thus decreasing the effective concentration of the functional duplex form. This suggests that the duplex is the preferred conformation for initial pre-RISC association. Indeed, although single complementary strands can induce gene silencing, the effective concentration required is at least two orders of magnitude higher than that of the duplex form.

[0363] siRNA-pre-RISC complex formation is followed by an ATP-dependent duplex unwinding step and “activation” of the RISC. The siRNA functionality was shown to correlate with overall low internal stability of the duplex and low internal stability of the 3′ sense end (or differential internal stability of the 3′ sense compare to the 5′ sense strand), which may reflect strand selection and entry into the RISC. Overall duplex stability and low internal stability at the 3′ end of the sense strand were also correlated with siRNA functionality. Interestingly, siRNAs with very high and very low overall stability profiles correlate strongly with non-functional duplexes. One interpretation is that high internal stability prevents efficient unwinding while very low stability reduces siRNA target affinity and subsequent mRNA cleavage by the RISC.

[0364] Several criteria describe base preferences at specific positions of the sense strand and are even more intriguing when considering their potential mechanistic roles in target recognition and mRNA cleavage. Base preferences for A at position 19 of the sense strand but not C, are particularly interesting because they reflect the same base preferences observed for naturally occurring miRNA precursors. That is, among the reported miRNA precursor sequences 75% contain a U at position 1 which corresponds to an A in position 19 of the sense strand of siRNAs, while G was under-represented in this same position for miRNA precursors. These observations support the hypothesis that both miRNA precursors and siRNA duplexes are processed by very similar if not identical protein machinery. The functional interpretation of the predominance of a U/A base pair is that it promotes flexibility at the 5′antisense ends of both siRNA duplexes and miRNA precursors and facilitates efficient unwinding and selective strand entrance into an activated RISC.

[0365] Among the criteria associated with base preferences that are likely to influence mRNA cleavage or possibly product release, the preference for U at position 10 of the sense strand exhibited the greatest impact, enhancing the probability of selecting an F80 sequence by 13.3%. Activated RISC preferentially cleaves target mRNA between nucleotides 10 and 11 relative to the 5′ end of the complementary targeting strand. Therefore, it may be that U, the preferred base for most endoribonucleases, at this position supports more efficient cleavage. Alternatively, a U/A bp between the targeting siRNA strand and its cognate target mRNA may create an optimal conformation for the RISC-associated “slicing” activity.

### Post Algorithm Filters

[0366] According to another embodiment, the output of any one of the formulas previously listed can be filtered to remove or select for siRNAs containing undesirable or desirable motifs or properties, respectively. In one example, sequences identified by any of the formulas can be filtered to remove any and all sequences that induce toxicity or cellular stress. Introduction of an siRNA containing a toxic motif into a cell can induce cellular stress and/or cell death (apoptosis) which in turn can mislead researchers into associating a particular (e.g., nonessential) gene with, e.g., an essential function. Alternatively, sequences generated by any of the before mentioned formulas can be filtered to identify and retain duplexes that contain toxic motifs. Such duplexes may be valuable from a variety of perspectives including, for instance, uses as therapeutic molecules. A variety of toxic motifs exist and can exert their influence on the cell through RNAi and non-RNAi pathways. Examples of toxic motifs are explained more fully in commonly assigned U.S. Provisional Patent Application Ser. No. 60/538,874, entitled “Identification of Toxic Sequences,” filed Jan. 23, 2004. Briefly, toxic: motifs include A/G UUU A/G/U, G/C AAA G/C, and GCCA, or a complement of any of the foregoing.

[0367] In another instance, sequences identified by any of the before mentioned formulas can be filtered to identify duplexes that contain motifs (or general properties) that provide serum stability or induce serum instability. In one envisioned application of siRNA as therapeutic molecules, duplexes targeting disease-associated genes will be introduced into patients intravenously. As the half-life of single and double stranded RNA in serum is short, post-algorithm filters designed to select molecules that contain motifs that enhance duplex stability in the presence of serum and/or (conversely) eliminate duplexes that contain motifs that destabilize siRNA in the presence of serum, would be beneficial.

[0368] In another instance, sequences identified by any of the before mentioned formulas can be filtered to identify duplexes that are hyperfunctional. Hyperfunctional sequences are defined as those sequences that (1) induce greater than 95% silencing of a specific target when they are transfected at subnanomolar concentrations (i.e., less than one nanomolar); and/or (2) induce functional (or better) levels of silencing for greater than 96 hours. Filters that identify hyperfunctional molecules can vary widely. In one example, the top ten, twenty, thirty, or forty siRNA can be assessed for the ability to silence a given target at, e.g., concentrations of 1 nM and 0.5 nM to identify hyperfunctional molecules.

### Pooling

[0369] According to another embodiment, the present invention provides a pool of at least two siRNAs, preferably in the form of a kit or therapeutic reagent, wherein one strand of each of the siRNAs, the sense strand comprises a sequence that is substantially similar to a sequence within a target mRNA. The opposite strand, the antisense strand, will preferably comprise a sequence that is substantially complementary to that of the target mRNA. More preferably, one strand of each siRNA will comprise a sequence that is identical to a sequence that is contained in the target mRNA. Most preferably, each siRNA will be 19 base pairs in length, and one strand of each of the siRNAs will be 100% complementary to a portion of the target mRNA.

[0370] By increasing the number of siRNAs directed to a particular target using a pool or kit, one is able both to increase the likelihood that at least one siRNA with satisfactory functionality will be included, as well as to benefit from additive or synergistic effects. Further, when two or more siRNAs directed against a single gene do not have satisfactory levels of functionality alone, if combined, they may satisfactorily promote degradation of the target messenger RNA and successfully inhibit translation. By including multiple siRNAs in the system, not only is the probability of silencing increased, but the economics of operation are also improved when compared to adding different siRNAs sequentially. This effect is contrary to the conventional wisdom that the concurrent use of multiple siRNA will negatively impact gene silencing (e.g., Holen, T. et al. (2003) Similar behavior of single strand and double strand siRNAs suggests they act through a common RNAi pathway. NAR 31: 2401-21407).

[0371] In fact, when two siRNAs were pooled together, 54% of the pools of two siRNAs induced more than 95% gene silencing. Thus, a 2.5-fold increase in the percentage of functionality was achieved by randomly combining two siRNAs. Further, over 84% of pools containing two siRNAs induced more than 80% gene silencing.

[0372] More preferably, the kit is comprised of at least three siRNAs, wherein one strand of each siRNA comprises a sequence that is substantially similar to a sequence of the target mRNA and the other strand comprises a sequence that is substantially complementary to the region of the target mRNA. As with the kit that comprises at least two siRNAs, more preferably one strand will comprise a sequence that is identical to a sequence that is contained in the mRNA and another strand that is 100% complementary to a sequence that is contained in the mRNA. During experiments, when three siRNAs were combined together, 60% of the pools induced more than 95% gene silencing and 92% of the pools induced more than 80% gene silencing.

[0373] Further, even more preferably, the kit is comprised of at least four siRNAs, wherein one strand of each siRNA comprises a sequence that is substantially similar to a region of the sequence of the target mRNA, and the other strand comprises a sequence that is substantially complementary to the region of the target mRNA. As with the kit or pool that comprises at least two siRNAs, more preferably one strand of each of the siRNA duplexes will comprise a sequence that is identical to a sequence that is contained in the mRNA, and another strand that is 100% complementary to a sequence that is contained in the mRNA.

[0374] Additionally, kits and pools with at least five, at least six, and at least seven siRNAs may also be useful with the present invention. For example, pools of five siRNA induced 95% gene silencing with 77% probability and 80% silencing with 98.8% probability. Thus, pooling of siRNAs together can result in the creation of a target-specific silencing reagent with almost a 99% probability of being functional. The fact that such high levels of success are achievable using such pools of siRNA, enables one to dispense with costly and time-consuming target-specific validation procedures.

[0375] For this embodiment, as well as the other aforementioned embodiments, each of the siRNAs within a pool will preferably comprise 18-30 base pairs, more preferably 18-25 base pairs, and most preferably 19 base pairs. Within each siRNA, preferably at least 18 contiguous bases of the antisense strand will be 100% complementary to the target mRNA. More preferably, at least 19 contiguous bases of the antisense strand will be 100% complementary to the target mRNA. Additionally, there may be overhangs on either the sense strand or the antisense strand, and these overhangs may be at either the 5′ end or the 3′ end of either of the strands, for example there may be one or more overhangs of 1-6 bases. When overhangs are present, they are not included in the calculation of the number of base pairs. The two nucleotide 3′ overhangs mimic natural siRNAs and are commonly used but are not essential. Preferably, the overhangs should consist of two nucleotides, most often dTdT or UU at the 3′ end of the sense and antisense strand that are not complementary to the target sequence. The siRNAs may be produced by any method that is now known or that comes to be known for synthesizing double stranded RNA that one skilled in the art would appreciate would be useful in the present invention. Preferably, the siRNAs will be produced by Dharmacon's proprietary ACE® technology. However, other methods for synthesizing siRNAs are well known to persons skilled in the art and include, but are not limited to, any chemical synthesis of RNA oligonucleotides, ligation of shorter oligonucleotides, in vitro transcription of RNA oligonucleotides, the use of vectors for expression within cells, recombinant Dicer products and PCR products.

[0376] The siRNA duplexes within the aforementioned pools of siRNAs may correspond to overlapping sequences within a particular mRNA, or non-overlapping sequences of the mRNA. However, preferably they correspond to non-overlapping sequences. Further, each siRNA may be selected randomly, or one or more of the siRNA may be selected according to the criteria discussed above for maximizing the effectiveness of siRNA.

[0377] Included in the definition of siRNAs are siRNAs that contain substituted and/or labeled nucleotides that may, for example, be labeled by radioactivity, fluorescence or mass. The most common substitutions are at the 2′ position of the ribose sugar, where moieties such as H (hydrogen) F, NH₃, OCH₃ and other O— alkyl, alkenyl, alkynyl, and orthoesters, may be substituted, or in the phosphorous backbone, where sulfur, amines or hydrocarbons may be substituted for the bridging of non-bridging atoms in the phosphodiester bond. Examples of modified siRNAs are explained more fully in commonly assigned U.S. patent application Ser. No. 10/613,077, filed Jul. 1, 2003.

[0378] Additionally, as noted above, the cell type into which the siRNA is introduced may affect the ability of the siRNA to enter the cell; however, it does not appear to affect the ability of the siRNA to function once it enters the cell. Methods for introducing double-stranded RNA into various cell types are well known to persons skilled in the art.

[0379] As persons skilled in the art are aware, in certain species, the presence of proteins such as RdRP, the RNA-dependent RNA polymerase, may catalytically enhance the activity of the siRNA. For example, RdRP propagates the RNAi effect in C. elegans and other non-mammalian organisms. In fact, in organisms that contain these proteins, the siRNA may be inherited. Two other proteins that are well studied and known to be a part of the machinery are members of the Argonaute family and Dicer, as well as their homologues. There is also initial evidence that the RISC complex might be associated with the ribosome so the more efficiently translated mRNAs will be more susceptible to silencing than others.

[0380] Another very important factor in the efficacy of siRNA is mRNA localization. In general, only cytoplasmic mRNAs are considered to be accessible to RNAi to any appreciable degree. However, appropriately designed siRNAs, for example, siRNAs modified with internucleotide linkages or 2′-O-methyl groups, may be able to cause silencing by acting in the nucleus. Examples of these types of modifications are described in commonly assigned U.S. patent application Ser. Nos. 10/431,027 and 10/613,077.

[0381] As described above, even when one selects at least two siRNAs at random, the effectiveness of the two may be greater than one would predict based on the effectiveness of two individual siRNAs. This additive or synergistic effect is particularly noticeable as one increases to at least three siRNAs, and even more noticeable as one moves to at least four siRNAs. Surprisingly, the pooling of the non-functional and semi-functional siRNAs, particularly more than five siRNAs, can lead to a silencing mixture that is as effective if not more effective than any one particular functional siRNA.

[0382] Within the kits of the present invention, preferably each siRNA will be present in a concentration of between 0.001 and 200 μM, more preferably between 0.01 and 200 nM, and most preferably between 0.1 and 10 nM.

[0383] In addition to preferably comprising at least four or five siRNAs, the kits of the present invention will also preferably comprise a buffer to keep the siRNA duplex stable. Persons skilled in the art are aware of buffers suitable for keeping siRNA stable. For example, the buffer may be comprised of 100 mM KCl, 30 mM HEPES-pH 7.5, and 1 mM MgCl₂. Alternatively, kits might contain complementary strands that contain any one of a number of chemical modifications (e.g., a 2′-O-ACE) that protect the agents from degradation by nucleases. In this instance, the user may (or may not) remove the modifying protective group (e.g., deprotect) before annealing the two complementary strands together.

[0384] By way of example, the kits may be organized such that pools of siRNA duplexes are provided on an array or microarray of wells or drops for a particular gene set or for unrelated genes. The array may, for example, be in 96 wells, 384 wells or 1284 wells arrayed in a plastic plate or on a glass slide using techniques now known or that come to be known to persons skilled in the art. Within an array, preferably there will be controls such as functional anti-lamin A/C, cyclophilin and two siRNA duplexes that are not specific to the gene of interest.

[0385] In order to ensure stability of the siRNA pools prior to usage, they may be retained in lyophilized form at minus twenty degrees (−20° C.) until they are ready for use. Prior to usage, they should be resuspended; however, even once resuspended, for example, in the aforementioned buffer, they should be kept at minus twenty degrees, (−20° C.) until used. The aforementioned buffer, prior to use, may be stored at approximately 4° C. or room temperature. Effective temperatures at which to conduct transfections are well known to persons skilled in the art and include for example, room temperature.

[0386] The kits may be applied either in vivo or in vitro. Preferably, the siRNA of the pools or kits is applied to a cell through transfection, employing standard transfection protocols. These methods are well known to persons skilled in the art and include the use of lipid-based carriers, electroporation, cationic carriers, and microinjection. Further, one could apply the present invention by synthesizing equivalent DNA sequences (either as two separate, complementary strands, or as hairpin molecules) instead of siRNA sequences and introducing them into cells through vectors. Once in the cells, the cloned DNA could be transcribed, thereby forcing the cells to generate the siRNA. Examples of vectors suitable for use with the present application include but are not limited to the standard transient expression vectors, adenoviruses, retroviruses, lentivirus-based vectors, as well as other traditional expression vectors. Any vector that has an adequate siRNA expression and procession module may be used. Furthermore, certain chemical modifications to siRNAs, including but not limited to conjugations to other molecules, may be used to facilitate delivery. For certain applications it may be preferable to deliver molecules without transfection by simply formulating in a physiological acceptable solution.

[0387] This embodiment may be used in connection with any of the aforementioned embodiments. Accordingly, the sequences within any pool may be selected by rational design.

### Multigene Silencing

[0388] In addition to developing kits that contain multiple siRNA directed against a single gene, another embodiment includes the use of multiple siRNA targeting multiple genes. Multiple genes may be targeted through the use of high- or hyper-functional siRNA. High- or hyper-functional siRNA that exhibit increased potency, require lower concentrations to induce desired phenotypic (and thus therapeutic) effects. This circumvents RISC saturation. It therefore reasons that if lower concentrations of a single siRNA are needed for knockout or knockdown expression of one gene, then the remaining (uncomplexed) RISC will be free and available to interact with siRNA directed against two, three, four, or more, genes. Thus in this embodiment, the authors describe the use of highly functional or hyper-functional siRNA to knock out three separate genes. More preferably, such reagents could be combined to knockout four distinct genes. Even more preferably, highly functional or hyperfunctional siRNA could be used to knock out five distinct genes. Most preferably, siRNA of this type could be used to knockout or knockdown the expression of six or more genes.

Hyperfunctional siRNA

[0389] The term hyperfunctional siRNA (hf-siRNA) describes a subset of the siRNA population that induces RNAi in cells at low- or sub-nanomolar concentrations for extended periods of time. These traits, heightened potency and extended longevity of the RNAi phenotype, are highly attractive from a therapeutic standpoint. Agents having higher potency require lesser amounts of the molecule to achieve the desired physiological response, thus reducing the probability of side effects due to “off-target” interference. In addition to the potential therapeutic benefits associated with hyperfunctional siRNA, hf-siRNA are also desirable from an economic perspective. Hyperfunctional siRNA may cost less on a per-treatment basis, thus reducing overall expenditures to both the manufacturer and the consumer.

[0390] Identification of hyperfunctional siRNA involves multiple steps that are designed to examine an individual siRNA agent's concentration- and/or longevity-profiles. In one non-limiting example, a population of siRNA directed against a single gene are first analyzed using the previously described algorithm (Formula VIII). Individual siRNA are then introduced into a test cell line and assessed for the ability to degrade the target mRNA. It is important to note that when performing this step it is not necessary to test all of the siRNA. Instead, it is sufficient to test only those siRNA having the highest SMARTSCORES™, or siRNA ranking (i.e., SMARTSCORES™M, or siRNA ranking >−10). Subsequently, the gene silencing data is plotted against the SMARTSCORES™, or siRNA rankings (see FIG. 9). siRNA that (1) induce a high degree of gene silencing (i.e., they induce greater than 80% gene knockdown) and (2) have superior SMARTSCORES™ (i.e., a SMARTSCORE™, or siRNA ranking, of >−10, suggesting a desirable average internal stability profile) are selected for further investigations designed to better understand the molecule's potency and longevity. In one, non-limiting study dedicated to understanding a molecule's potency, an siRNA is introduced into one (or more) cell types in increasingly diminishing concentrations (e.g., 3.0→0.3 nM). Subsequently, the level of gene silencing induced by each concentration is examined and siRNA that exhibit hyperfunctional potency (i.e., those that induce 80% silencing or greater at, e.g., picomolar concentrations) are identified. In a second study, the longevity profiles of siRNA having high (>−10) SMARTSCORES™, or siRNA rankings and greater than 80% silencing are examined. In one non-limiting example of how this is achieved, siRNA are introduced into a test cell line and the levels of RNAi are measured over an extended period of time (e.g., 24-168 hrs). siRNAs that exhibit strong RNA interference patterns (i.e., >80% interference) for periods of time greater than, e.g., 120 hours, are thus identified. Studies similar to those described above can be performed on any and all of the >10⁶ siRNA included in this document to further define the most functional molecule for any given gene. Molecules possessing one or both properties (extended longevity and heightened potency) are labeled “hyperfunctional siRNA,” and earmarked as candidates for future therapeutic studies.

[0391] While the example(s) given above describe one means by which hyperfunctional siRNA can be isolated, neither the assays themselves nor the selection parameters used are rigid and can vary with each family of siRNA. Families of siRNA include siRNAs directed against a single gene, or directed against a related family of genes.

[0392] The highest quality siRNA achievable for any given gene may vary considerably. Thus, for example, in the case of one gene (gene X), rigorous studies such as those described above may enable the identification of an siRNA that, at picomolar concentrations, induces 99⁺% silencing for a period of 10 days. Yet identical studies of a second gene (gene Y) may yield an siRNA that at high nanomolar concentrations (e.g., 100 nM) induces only 75% silencing for a period of 2 days. Both molecules represent the very optimum siRNA for their respective gene targets and therefore are designated “hyperfunctional.” Yet due to a variety of factors including but not limited to target concentration, siRNA stability, cell type, off-target interference, and others, equivalent levels of potency and longevity are not achievable. Thus, for these reasons, the parameters described in the before mentioned assays can vary. While the initial screen selected siRNA that had SMARTSCORES™ above −10 and a gene silencing capability of greater than 80%, selections that have stronger (or weaker) parameters can be implemented. Similarly, in the subsequent studies designed to identify molecules with high potency and longevity, the desired cutoff criteria (i.e., the lowest concentration that induces a desirable level of interference, or the longest period of time that interference can be observed) can vary. The experimentation subsequent to application of the rational criteria of this application is significantly reduced where one is trying to obtain a suitable hyperfunctional siRNA for, for example, therapeutic use. When, for example, the additional experimentation of the type described herein is applied by one skilled in the art with this disclosure in hand, a hyperfunctional siRNA is readily identified.

[0393] The siRNA may be introduced into a cell by any method that is now known or that comes to be known and that from reading this disclosure, persons skilled in the art would determine would be useful in connection with the present invention in enabling siRNA to cross the cellular membrane. These methods include, but are not limited to, any manner of transfection, such as, for example, transfection employing DEAE-Dextran, calcium phosphate, cationic lipids/liposomes, micelles, manipulation of pressure, microinjection, electroporation, immunoporation, use of vectors such as viruses, plasmids, cosmids, bacteriophages, cell fusions, and coupling of the polynucleotides to specific conjugates or ligands such as antibodies, antigens, or receptors, passive introduction, adding moieties to the siRNA that facilitate its uptake, and the like.

[0394] Having described the invention with a degree of particularity, examples will now be provided. These examples are not intended to and should not be construed to limit the scope of the claims in any way.

### EXAMPLES

### General Techniques and Nomenclatures

[0395] siRNA nomenclature. All siRNA duplexes are referred to by sense strand. The first nucleotide of the 5′-end of the sense strand is position 1, which corresponds to position 19 of the antisense strand for a 19-mer. In most cases, to compare results from different experiments, silencing was determined by measuring specific transcript mRNA levels or enzymatic activity associated with specific transcript levels, 24 hours post-transfection, with siRNA concentrations held constant at 100 nM. For all experiments, unless otherwise specified, transfection efficiency was ensured to be over 95%, and no detectable cellular toxicity was observed. The following system of nomenclature was used to compare and report siRNA-silencing functionality: “F” followed by the degree of minimal knockdown. For example, F50 signifies at least 50% knockdown, F80 means at least 80%, and so forth. For this study, all sub-F50 siRNAs were considered non-functional.

[0396] Cell culture and transfection. 96-well plates are coated with 50 μl of 50 mg/ml poly-L-lysine (Sigma) for 1 hr, and then washed 3× with distilled water before being dried for 20 min. HEK293 cells or HEK293Lucs or any other cell type of interest are released from their solid support by trypsinization, diluted to 3.5×10⁵ cells/ml, followed by the addition of 100 μL of cells/well. Plates are then incubated overnight at 37° C., 5% CO₂. Transfection procedures can vary widely depending on the cell type and transfection reagents. In one non-limiting example, a transfection mixture consisting of 2 mL Opti-MEM 1 (Gibco-BRL), 80 μl Lipofectamine 2000 (Invitrogen), 15 μL SUPERNasin at 20 U/μl (Ambion), and 1.5 μl of reporter gene plasmid at 1 μg/μl is prepared in 5-ml polystyrene round bottom tubes. One hundred μl of transfection reagent is then combined with 100 μl of siRNAs in polystyrene deep-well titer plates (Beckman) and incubated for 20 to 30 min at room temperature. Five hundred and fifty microliters of Opti-MEM is then added to each well to bring the final siRNA concentration to 100 nM. Plates are then sealed with parafilm and mixed. Media is removed from HEK293 cells and replaced with 95 μl of transfection mixture. Cells are incubated overnight at 37° C., 5% CO₂.

[0397] Quantification of gene knockdown. A variety of quantification procedures can be used to measure the level of silencing induced by siRNA or siRNA pools. In one non-limiting example: to measure mRNA levels 24 hrs post-transfection, QuantiGene branched-DNA (bDNA) kits (Bayer) (Wang, et al, Regulation of insulin preRNA splicing by glucose. Proc. Natl. Acad. Sci. USA 1997, 94:4360.) are used according to manufacturer instructions. To measure luciferase activity, media is removed from HEK293 cells 24 hrs post-transfection, and 50 μl of Steady-GLO reagent (Promega) is added. After 5 minutes, plates are analyzed on a plate reader.

### Example I

### Sequences Used to Develop the Algorithm

[0398] Anti-Firefly and anti-Cyclophilin siRNAs panels (FIG. 5a, b) sorted according to using Formula VIII predicted values. All siRNAs scoring more than 0 (formula VIII) and more then 20 (formula IX) are fully functional. All ninety sequences for each gene (and DBI) appear below in Table III.

TABLE III

| | | | |
|---|---|---|---|
| Cyclo | 1 | SEQ. ID 0032 | GUUCCAAAAACACUCGAUA |
| Cyclo | 2 | SEQ. ID 0033 | UCCAAAAACAGUGGAUAAU |
| Cyclo | 3 | SEQ. ID 0034 | CAAAAACAGUGCAUAAUUU |
| Cyclo | 4 | SEQ. ID 0035 | AAAACAGUGGAUAAUUUUG |
| Cyclo | 5 | SEQ. ID 0036 | AACAGUGGAUAAUUUUGUG |
| Cyclo | 6 | SEQ. ID 0037 | CAGUGGAUAAUUUUGUGGC |
| Cyclo | 7 | SEQ. ID 0038 | GUGGAUAAUUUUGUGGCCU |
| Cyclo | 8 | SEQ. ID 0039 | GGAUAAUUUUGUGGCCUUA |
| Cyclo | 9 | SEQ. ID 0040 | AUAAUUUUGUGGCCUUAGC |
| Cyclo | 10 | SEQ. ID 0041 | AAUUUUGUCGCCUUAGCUA |
| Cyclo | 11 | SEQ. ID 0042 | UUUUCUGGCCUUAGCUACA |
| Cyclo | 12 | SEQ. ID 0043 | UUGUGGCCUUAGCUACAGG |
| Cyclo | 13 | SEQ. ID 0044 | GUCGCCUUAGCUACAGGAG |
| Cyclo | 14 | SEQ. ID 0045 | GGCCUUAGCUACAGGAGAG |
| Cyclo | 15 | SEQ. ID 0046 | CCUUAGCUACAGGAGAGAA |
| Cyclo | 16 | SEQ. ID 0047 | UUAGCUACAGGAGAGAAAG |
| Cyclo | 17 | SEQ. ID 0048 | AGCUACAGGAGAGAAAGGA |
| Cyclo | 18 | SEQ. ID 0049 | CUACAGGAGAGAAAGGAUU |
| Cyclo | 19 | SEQ. ID 0050 | ACAGGACAGAAAGGAUUUG |
| Cyclo | 20 | SEQ. ID 0051 | AGGAGAGAAAGGAUUUGGC |
| Cyclo | 21 | SEQ. ID 0052 | GAGAGAAAGGAUUUGGCUA |
| Cyclo | 22 | SEQ. ID 0053 | GAGAAAGGAUUUGGCUACA |
| Cyclo | 23 | SEQ. ID 0054 | GAAAGGAUUUGGCUACAAA |
| Cyclo | 24 | SEQ. ID 0055 | AAGGAUUUGGCUACAAAAA |
| Cyclo | 25 | SEQ. ID 0056 | GGAUUUGGCUACAAAAACA |
| Cyclo | 26 | SEQ. ID 0057 | AUUUGGCUACAAAAACAGC |
| Cyclo | 27 | SEQ. ID 0058 | UUGGCUACAAAAACAGCAA |
| Cyclo | 28 | SEQ. ID 0059 | GGCUACAAAAACAGCAAAU |
| Cyclo | 29 | SEQ. ID 0060 | CUACAAAAACAGCAAAUUC |
| Cyclo | 30 | SEQ. ID 0061 | ACAAAAACAGCAAAUUCCA |
| Cyclo | 31 | SEQ. ID 0062 | AAAAACAGCAAAUUCCAUC |
| Cyclo | 32 | SEQ. ID 0063 | AAACAGCAAAUUCCAUCGU |
| Cyclo | 33 | SEQ. ID 0064 | ACAGCAAAUUCCAUCGUGU |
| Cyclo | 34 | SEQ. ID 0065 | AGCAAAUUCCAUCGUGUAA |
| Cyclo | 35 | SEQ. ID 0066 | CAAAUUCCAUCGUGUAAUC |
| Cyclo | 36 | SEQ. ID 0067 | AAUUCCAUCGUGUAAUCAA |
| Cyclo | 37 | SEQ. ID 0068 | UUCCAUCGUGUAAUCAAGG |
| Cyclo | 38 | SEQ. ID 0069 | CCAUCGUGUAAUCAAGGAC |
| Cyclo | 39 | SEQ. ID 0070 | AUCGUGUAAUCAAGGACUU |
| Cyclo | 40 | SEQ. ID 0071 | CGUGUAAUCAAGGACUUCA |
| Cyclo | 41 | SEQ. ID 0072 | UGUAAUCAACGACUUCAUG |
| Cyclo | 42 | SEQ. ID 0073 | UAAUCAAGGACUUCAUGAU |
| Cyclo | 43 | SEQ. ID 0074 | AUCAAGGACUUCAUGAUCC |
| Cyclo | 44 | SEQ. ID 0075 | CAACGACUUCAUGAUCCAG |
| Cyclo | 45 | SEQ. ID 0076 | AGGACUUCAUGAUCCAGGG |
| Cyclo | 46 | SEQ. ID 0077 | GACUUCAUGAUCCAGGGCG |
| Cyclo | 47 | SEQ. ID 0078 | CUUCAUGAUCCAGGGCGGA |
| Cyclo | 48 | SEQ. ID 0079 | UCAUGAUCCAGGGCGGAGA |
| Cyclo | 49 | SEQ. ID 0080 | AUGAUCCAGGGCGGAGACU |
| Cyclo | 50 | SEQ. ID 0081 | GAUCCAGGGCGGAGACUUC |
| Cyclo | 51 | SEQ. ID 0082 | UCCAGGGCGGAGACUUCAC |
| Cyclo | 52 | SEQ. ID 0083 | CAGGGCGGACACUUCACCA |
| Cyclo | 53 | SEQ. ID 0084 | GGGCGGAGACUUCACCAGG |
| Cyclo | 54 | SEQ. ID 0085 | GCGGAGACUUCACCAGGGG |
| Cyclo | 55 | SEQ. ID 0086 | GGACACUUCACCAGGGGAG |
| Cyclo | 56 | SEQ. ID 0087 | AGACUUCACCAGGGGAGAU |
| Cyclo | 57 | SEQ. ID 0088 | ACUUCACCAGGGGAGAUGG |
| Cyclo | 58 | SEQ. ID 0089 | UUCACCAGGGGAGAUGGCA |
| Cyclo | 59 | SEQ. ID 0090 | CACCAGGGGAGAUGGCACA |
| Cyclo | 60 | SEQ. ID 0091 | CCAGGGGAGAUGGCACAGG |
| Cyclo | 61 | SEQ. ID 0092 | AGGGGAGAUGGCACAGGAG |
| Cyclo | 62 | SEQ. ID 0093 | GGGAGAUGGCACAGGAGGA |
| Cyclo | 63 | SEQ. ID 0094 | GAGAUGGCACAGGAGGAAA |
| Cyclo | 64 | SEQ. ID 0095 | GAUGGCACAGGAGGAAAGA |
| Cyclo | 65 | SEQ. ID 0096 | UGGCACAGGAGGAAAGAGC |
| Cyclo | 66 | SEQ. ID 0097 | GCACAGGAGCAAAGACCAU |
| Cyclo | 67 | SEQ. ID 0098 | ACAGGAGGAAAGAGCAUCU |
| Cyclo | 68 | SEQ. ID 0099 | AGGAGGAAAGAGCAUCUAC |
| Cyclo | 69 | SEQ. ID 0100 | GAGGAAAGAGCAUCUACGG |
| Cyclo | 70 | SEQ. ID 0101 | GGAAAGAGCAUCUACGGUG |
| Cyclo | 71 | SEQ. ID 0102 | AAAGAGCAUCUACGGUGAG |
| Cyclo | 72 | SEQ. ID 0103 | AGAGCAUCUACGGUGAGCG |
| Cyclo | 73 | SEQ. ID 0104 | AGCAUCUACGGUGAGCGCU |
| Cyclo | 74 | SEQ. ID 0105 | CAUCUACGGUGAGCGCUUC |
| Cyclo | 75 | SEQ. ID 0106 | UCUACGGUGAGCGCUUCCC |
| Cyclo | 76 | SEQ. ID 0107 | UACGGUGAGCGCUUCCCCG |
| Cyclo | 77 | SEQ. ID 0108 | CGGUCAGCGCUUCCCCGAU |
| Cyclo | 78 | SEQ. ID 0109 | GUGAGCGCUUCCCCGAUGA |
| Cyclo | 79 | SEQ. ID 0110 | GAGCGCUUCCCCGAUGAGA |
| Cyclo | 80 | SEQ. ID 0111 | GCGCUUCCCCGAUGAGAAC |
| Cyclo | 81 | SEQ. ID 0112 | GCUUCCCCGAUGAGAACUU |
| Cyclo | 82 | SEQ. ID 0113 | UUCCCCGAUGAGAACUUCA |
| Cyclo | 83 | SEQ. ID 0114 | CCCCGAUGAGAACUUCAAA |
| Cyclo | 84 | SEQ. ID 0115 | CCGAUGAGAACUUCAAACU |
| Cyclo | 85 | SEQ. ID 0116 | GAUGAGAACUUCAAACUGA |
| Cyclo | 86 | SEQ. ID 0117 | UGAGAACUUCAAACUGAAG |
| Cyclo | 87 | SEQ. ID 0118 | AGAACUUCAAACUGAAGCA |
| Cyclo | 88 | SEQ. ID 0119 | AACUUCAAACUGAAGCACU |
| Cyclo | 89 | SEQ. ID 0120 | CUUCAAACUGAAGCACUAC |
| Cyclo | 90 | SEQ. ID 0121 | UCAAACUGAAGCACUACGG |
| DB | 1 | SEQ. ID 0122 | ACGGGCAAGGCCAAGUGGG |
| DB | 2 | SEQ. ID 0123 | CGGGCAAGGCCAAGUGGGA |
| DB | 3 | SEQ. ID 0124 | GGGCAAGGCCAAGUGGGAU |
| DB | 4 | SEQ. ID 0125 | GGCAAGGCCAAGUGGGAUG |
| DB | 5 | SEQ. ID 0126 | GCAAGGCCAAGUGGGAUGC |
| DB | 6 | SEQ. ID 0127 | CAAGGCCAAGUGGGAUGCC |
| DB | 7 | SEQ. ID 0128 | AAGGCCAAGUGGGAUGCCU |
| DB | 8 | SEQ. ID 0129 | AGGCCAAGUGGGAUGCCUG |
| DB | 9 | SEQ. ID 0130 | GGCCAAGUGGGAUGCCUGG |
| DB | 10 | SEQ. ID 0131 | GCCAAGUGGGAUGCCUGGA |
| DB | 11 | SEQ. ID 0132 | CCAAGUGGGAUGCCUGGAA |
| DB | 12 | SEQ. ID 0133 | CAAGUGGGAUGCCUGGAAU |
| DB | 13 | SEQ. ID 0134 | AAGUGGGAUGCCUGGAAUG |
| DB | 14 | SEQ. ID 0135 | ACUGGGAUGCCUGGAAUGA |
| DB | 15 | SEQ. ID 0136 | GUGGGAUGCCUGGAAUGAG |
| DB | 16 | SEQ. ID 0137 | UGGGAUGCCUGGAAUGAGC |
| DB | 17 | SEQ. ID 0138 | GGGAUGCCUGGAAUGAGCU |
| DB | 18 | SEQ. ID 0139 | GGAUGCCUGGAAUGAGCUG |
| DB | 19 | SEQ. ID 0140 | GAUGCCUGGAAUGAGCUGA |
| DB | 20 | SEQ. ID 0141 | AUGCCUGGAAUGAGCUGAA |
| DB | 21 | SEQ. ID 0142 | UGCCUGGAAUGAGCUGAAA |
| DB | 22 | SEQ. ID 0143 | GCCUGGAAUGAGCUGAAAG |
| DB | 23 | SEQ. ID 0144 | CCUGGAAUGAGCUGAAAGG |
| DB | 24 | SEQ. ID 0145 | CUGGAAUGAGCUGAAAGGG |
| DB | 25 | SEQ. ID 0146 | UGGAAUGAGCUGAAAGGGA |
| DB | 26 | SEQ. ID 0147 | GGAAUGAGCUGAAAGGGAC |
| DB | 27 | SEQ. ID 0148 | GAAUGAGCUGAAAGGGACU |
| DB | 28 | SEQ. ID 0149 | AAUGAGCUGAAAGGGACUU |
| DB | 29 | SEQ. ID 0150 | AUGAGCUGAAAGGGACUUC |
| DB | 30 | SEQ. ID 0151 | UGAGCUGAAAGGGACUUCC |
| DB | 31 | SEQ. ID 0152 | GAGCUGAAAGGGACUUCCA |
| DB | 32 | SEQ. ID 0153 | AGCUGAAAGGGACUUCCAA |
| DB | 33 | SEQ. ID 0154 | GCUGAAAGGGACUUCCAAG |
| DB | 34 | SEQ. ID 0155 | CUGAAAGGGACUUCCAAGG |
| DB | 35 | SEQ. ID 0156 | UGAAAGGGACUUCCAAGGA |
| DB | 36 | SEQ. ID 0157 | GAAAGGGACUUCCAAGGAA |
| DB | 37 | SEQ. ID 0158 | AAAGGGACUUCCAAGGAAG |
| DB | 38 | SEQ. ID 0159 | AAGGGACUUCCAAGGAAGA |
| DB | 39 | SEQ. ID 0160 | AGGGACUUCCAAGGAAGAU |
| DB | 40 | SEQ. ID 0161 | GGGACUUCCAAGGAAGAUG |
| DB | 41 | SEQ. ID 0162 | GGACUUCCAAGGAAGAUGC |
| DB | 42 | SEQ. ID 0163 | GACUUCCAAGGAACAUGCC |
| DB | 43 | SEQ. ID 0164 | ACUUCCAAGGAAGAUGCCA |
| DR | 44 | SEQ. ID 0165 | CUUCCAAGGAAGAUGCCAU |
| DR | 45 | SEQ. ID 0166 | UUCCAAGGAAGAUGCCAUG |
| DB | 46 | SEQ. ID 0167 | UCCAAGGAAGAUGCCAUGA |
| DB | 47 | SEQ. ID 0168 | CCAAGGAAGAUGCCAUGAA |
| DR | 48 | SEQ. ID 0169 | CAAGGAAGAUGCCAUGAAA |
| DB | 49 | SEQ. ID 0170 | AAGGAAGAUGCCAUGAAAG |
| DB | 50 | SEQ. ID 0171 | AGGAAGAUGCCAUGAAAGC |
| DB | 51 | SEQ. ID 0172 | GGAAGAUGCCAUGAAAGCU |
| DB | 52 | SEQ. ID 0173 | GAAGAUGCCAUGAAAGCUU |
| DB | 53 | SEQ. ID 0174 | AAGAUGCCAUGAAAGCUUA |
| DB | 54 | SEQ. ID 0175 | AGAUGCCAUGAAAGCUUAC |
| DB | 55 | SEQ. ID 0176 | GAUGCCAUGAAAGCUUACA |
| DB | 56 | SEQ. ID 0177 | AUGCCAUGAAAGCUUACAU |
| DB | 57 | SEQ. ID 0178 | UGCCAUGAAAGCUUACAUC |
| DB | 58 | SEQ. ID 0179 | GCCAUGAAAGCUUACAUCA |
| DB | 59 | SEQ. ID 0180 | CCAUGAAAGCUUACAUCAA |
| DB | 60 | SEQ. ID 0181 | CAUGAAAGCUUACAUCAAC |
| DB | 61 | SEQ. ID 0182 | AUGAAAGCUUACAUCAACA |
| DB | 62 | SEQ. ID 0183 | UGAAAGCUUACAUCAACAA |
| DB | 63 | SEQ. ID 0184 | GAAAGCUUACAUCAACAAA |
| DB | 64 | SEQ. ID 0185 | AAAGCUUACAUCAACAAAG |
| DB | 65 | SEQ. ID 0186 | AAGCUUACAUCAACAAAGU |
| DB | 66 | SEQ. ID 0187 | AGCUUACAUCAACAAAGUA |
| DB | 67 | SEQ. ID 0188 | GCUUACAUCAACAAAGUAG |
| DB | 68 | SEQ. ID 0189 | CUUACAUCAACAAAGUAGA |
| DB | 69 | SEQ. ID 0190 | UUACAUCAACAAAGUAGAA |
| DB | 70 | SEQ. ID 0191 | UACAUCAACAAAGUAGAAG |
| DB | 71 | SEQ. ID 0192 | ACAUCAACAAAGUAGAAGA |
| DB | 72 | SEQ. ID 0193 | CAUCAACAAAGUAGAAGAG |
| DB | 73 | SEQ. ID 0194 | AUCAACAAAGUAGAAGAGC |
| DB | 74 | SEQ. ID 0195 | UCAACAAAGUAGAAGAGCU |
| DB | 75 | SEQ. ID 0196 | CAACAAAGUAGAAGAGCUA |
| DB | 76 | SEQ. ID 0197 | AACAAAGUAGAAGAGCUAA |
| DB | 77 | SEQ. ID 0198 | ACAAAGUAGAAGAGCUAAA |
| DB | 78 | SEQ. ID 0199 | CAAAGUAGAAGAGCUAAAG |
| DB | 79 | SEQ. ID 0200 | AAAGUAGAAGAGCUAAAGA |
| DB | 80 | SEQ. ID 0201 | AAGUAGAAGAGCUAAAGAA |
| DB | 81 | SEQ. ID 0202 | AGUAGAAGAGCUAAAGAAA |
| DB | 82 | SEQ. ID 0203 | GUAGAAGAGCUAAAGAAAA |
| DB | 83 | SEQ. ID 0204 | UAGAAGAGCUAAAGAAAAA |
| DB | 84 | SEQ. ID 0205 | AGAAGAGCUAAAGAAAAAA |
| DB | 85 | SEQ. ID 0206 | GAAGAGCUAAAGAAAAAAU |
| DB | 86 | SEQ. ID 0207 | AAGAGCUAAAGAAAAAAUA |
| DB | 87 | SEQ. ID 0208 | AGAGCUAAAGAAAAAAUAC |
| DB | 88 | SEQ. ID 0209 | GAGCUAAAGAAAAAAUACG |
| DB | 89 | SEQ. ID 0210 | AGCUAAAGAAAAAAUACGG |
| DB | 90 | SEQ. ID 0211 | GCUAAAGAAAAAAUACGGG |
| Luc | 1 | SEQ. ID 0212 | AUCCUCAUAAAGGCCAAGA |
| Luc | 2 | SEQ. ID 0213 | AGAUCCUCAUAAAGGCCAA |
| Luc | 3 | SEQ. ID 0214 | AGAGAUCCUCAUAAAGGCC |
| Luc | 4 | SEQ. ID 0215 | AGAGAGAUCCUCAUAAAGG |
| Luc | 5 | SEQ. ID 0216 | UCAGAGAGAUCCUCAUAAA |
| Luc | 6 | SEQ. ID 0217 | AAUCAGAGAGAUCCUCAUA |
| Luc | 7 | SEQ. ID 0218 | AAAAUCAGAGAGAUCCUCA |
| Luc | 8 | SEQ. ID 0219 | GAAAAAUCAGAGAGAUCCU |
| Luc | 9 | SEQ. ID 0220 | AAGAAAAAUCAGAGAGAUC |
| Luc | 10 | SEQ. ID 0221 | GCAAGAAAAAUCAGAGAGA |
| Luc | 11 | SEQ. ID 0222 | ACGCAAGAAAAAUCAGAGA |
| Luc | 12 | SEQ. ID 0223 | CGACGCAAGAAAAAUCAGA |
| Luc | 13 | SEQ. ID 0224 | CUCGACGCAAGAAAAAUCA |
| Luc | 14 | SEQ. ID 0225 | AACUCGACGCAAGAAAAAU |
| Luc | 15 | SEQ. ID 0226 | AAAACUCGACGCAAGAAAA |
| Luc | 16 | SEQ. ID 0227 | GGAAAACUCGACGCAAGAA |
| Luc | 17 | SEQ. ID 0228 | CCGGAAAACUCGACGCAAG |
| Luc | 18 | SEQ. ID 0229 | UACCGGAAAACUCGACGCA |
| Luc | 19 | SEQ. ID 0230 | CUUACCGGAAAACUCGACG |
| Luc | 20 | SEQ. ID 0231 | GUCUUACCGGAAAACUCGA |
| Luc | 21 | SEQ. ID 0232 | AGGUCUUACCGGAAAACUC |
| Luc | 22 | SEQ. ID 0233 | AAAGGUCUUACCGGAAAAC |
| Luc | 23 | SEQ. ID 0234 | CGAAAGGUCUUACCGGAAA |
| Luc | 24 | SEQ. ID 0235 | ACCGAAAGGUCUUACCGGA |
| Luc | 25 | SEQ. ID 0236 | GUACCGAAAGGUCUUACCG |
| Luc | 26 | SEQ. ID 0237 | AAGUACCGAAAGGUCUUAC |
| Luc | 27 | SEQ. ID 0238 | CGAAGUACCGAAAGGUCUU |
| Luc | 28 | SEQ. ID 0239 | GACGAAGUACCGAAAGGUC |
| Luc | 29 | SEQ. ID 0240 | UGGACGAAGUACCGAAAGG |
| Luc | 30 | SEQ. ID 0241 | UGUGGACGAAGUACCGAAA |
| Luc | 31 | SEQ. ID 0242 | UUUGUGGACGAAGUACCGA |
| Luc | 32 | SEQ. ID 0243 | UGUUUGUGGACGAAGUACC |
| Luc | 33 | SEQ. ID 0244 | UGUGUUUGUGGACGAAGUA |
| Luc | 34 | SEQ. ID 0245 | GUUGUGUUUGUGGACGAAG |
| Luc | 35 | SEQ. ID 0246 | GAGUUGUGUUUGUGGACGA |
| Luc | 36 | SEQ. ID 0247 | AGGAGUUGUGUUUGUGGAC |
| Luc | 37 | SEQ. ID 0248 | GGAGGAGUUGUGUUUGUGG |
| Luc | 38 | SEQ. ID 0249 | GCGGAGGAGUUGUGUUUGU |
| Luc | 39 | SEQ. ID 0250 | GCGCGGAGGAGUUGUGUUU |
| Luc | 40 | SEQ. ID 0251 | UUGCGCGGAGGAGUUGUGU |
| Luc | 41 | SEQ. ID 0252 | AGUUGCGCGGAGGAGUUGU |
| Luc | 42 | SEQ. ID 0253 | AAAGUUGCGCGGAGGAGUU |
| Luc | 43 | SEQ. ID 0254 | AAAAAGUUGCGCGGAGGAG |
| Luc | 44 | SEQ. ID 0255 | CGAAAAAGUUGCGCGGAGG |
| Luc | 45 | SEQ. ID 0256 | CGCGAAAAAGUUGCGCGGA |
| Luc | 46 | SEQ. ID 0257 | ACCGCGAAAAAGUUGCGCG |
| Luc | 47 | SEQ. ID 0258 | CAACCGCGAAAAAGUUGCG |
| Luc | 48 | SEQ. ID 0259 | AACAACCGCGAAAAAGUUG |
| Luc | 49 | SEQ. ID 0260 | GUAACAACCGCGAAAAAGU |
| Luc | 50 | SEQ. ID 0261 | AAGUAACAACCGCGAAAAA |
| Luc | 51 | SEQ. ID 0262 | UCAAGUAACAACCGCGAAA |
| Luc | 52 | SEQ. ID 0263 | AGUCAAGUAACAACCGCGA |
| Luc | 53 | SEQ. ID 0264 | CCAGUCAAGUAACAACCGC |
| Luc | 54 | SEQ. ID 0265 | CGCCAGUCAAGUAACAACC |
| Luc | 55 | SEQ. ID 0266 | GUCGCCAGUCAAGUAACAA |
| Luc | 56 | SEQ. ID 0267 | ACGUCGCCAGUCAAGUAAC |
| Luc | 57 | SEQ. ID 0268 | UUACGUCGCCAGUCAAGUA |
| Luc | 58 | SEQ. ID 0269 | GAUUACGUCGCCAGUCAAG |
| Luc | 59 | SEQ. ID 0270 | UGGAUUACGUCGCCAGUCA |
| Luc | 60 | SEQ. ID 0271 | CGUGGAUUACGUCGCCAGU |
| Luc | 61 | SEQ. ID 0272 | AUCGUGGAUUACGUCGCCA |
| Luc | 62 | SEQ. ID 0273 | AGAUCGUGGAUUACGUCGC |
| Luc | 63 | SEQ. ID 0274 | AGAGAUCGUGGAUUACGUC |
| Luc | 64 | SEQ. ID 0275 | AAAGAGAUCGUGGAUUACG |
| Luc | 65 | SEQ. ID 0276 | AAAAAGAGAUCGUGGAUUA |
| Luc | 66 | SEQ. ID 0277 | GGAAAAAGAGAUCGDGGAU |
| Luc | 67 | SEQ. ID 0278 | ACGGAAAAAGAGAUCGUGG |
| Luc | 68 | SEQ. ID 0279 | UGACGGAAAAAGAGAUCGU |
| Luc | 69 | SEQ. ID 0280 | GAUGACGGAAAAAGAGAUC |
| Luc | 70 | SEQ. ID 0281 | ACGAUGACGGAAAAAGAGA |
| Luc | 71 | SEQ. ID 0282 | AGACGAUGACGGAAAAAGA |
| Luc | 72 | SEQ. ID 0283 | AAAGACGAUGACGGAAAAA |
| Luc | 73 | SEQ. ID 0284 | GGAAAGACGAUGACGGAAA |
| Luc | 74 | SEQ. ID 0285 | ACGGAAAGACGAUGACGGA |
| Luc | 75 | SEQ. ID 0286 | GCACGGAAAGACGADGACG |
| Luc | 76 | SEQ. ID 0287 | GAGCACGGAAAGACGAUGA |
| Luc | 77 | SEQ. ID 0288 | UGGAGCACGGAAAGACGAU |
| Luc | 78 | SEQ. ID 0289 | UUUGGAGCACGGAAAGACG |
| Luc | 79 | SEQ. ID 0290 | GUUUUGGAGCACGGAAAGA |
| Luc | 80 | SEQ. ID 0291 | UUGUUUUGGAGCACGGAAA |
| Luc | 81 | SEQ. ID 0292 | UGUUGUUUUGGAGCACGGA |
| Luc | 82 | SEQ. ID 0293 | GUUGDUGUUUUGGAGCACG |
| Luc | 83 | SEQ. ID 0294 | CCGUUGUUGUUUUGGAGCA |
| Luc | 84 | SEQ. ID 0295 | CGCCGUUGUUGUUUUGGAG |
| Luc | 85 | SEQ. ID 0296 | GCCGCCGUUGUUGUUUUGG |
| Luc | 86 | SEQ. ID 0297 | CCGCCGCCGUUGUUGUUUU |
| Luc | 87 | SEQ. ID 0298 | UCCCGCCGCCGUUGUUGUU |
| Luc | 88 | SEQ. ID 0299 | CUUCCCGCCGCCGUUGUUG |
| Luc | 89 | SEQ. ID 0300 | AACUUCCCGCCGCCGUUGU |
| Luc | 90 | SEQ. ID 0301 | UGAACUUCCCGCCGCCGUU |

### Example II

### Validation of the Algorithm Using DBI, Luciferase, PLK, EGFR, and SEAP

[0399] The algorithm (Formula VIII) identified siRNAs for five genes, human DBI, firefly luciferase (fLuc), renilla luciferase (rLuc), human PLK, and human secreted alkaline phosphatase (SEAP). Four individual siRNAs were selected on the basis of their SMARTSCORES™ derived by analysis of their sequence using Formula VIII (all of the siRNAs would be selected with Formula IX as well) and analyzed for their ability to silence their targets expression. In addition to the scoring, a BLAST search was conducted for each siRNA. To minimize the potential for off-target silencing effects, only those target sequences with more than three mismatches against un-related sequences were selected. Semizarov, et al. (2003) Specificity of short interfering RNA determined through gene expression signatures, Proc. Natl. Acad. Sci. USA, 100:6347. These duplexes were analyzed individually and in pools of 4 and compared with several siRNAs that were randomly selected. The functionality was measured as a percentage of targeted gene knockdown as compared to controls. All siRNAs were transfected as described by the methods above at 100 nM concentration into HEK293 using Lipofectamine 2000. The level of the targeted gene expression was evaluated by B-DNA as described above and normalized to the non-specific control. FIG. 10 shows that the siRNAs selected by the algorithm disclosed herein were significantly more potent than randomly selected siRNAs. The algorithm increased the chances of identifying an F50 siRNA from 48% to 91%, and an F80 siRNA from 13% to 57%. In addition, pools of SMART siRNA silence the selected target better than randomly selected pools (see FIG. 10F).

### Example III

### Validation of the Algorithm Using Genes Involved in Clathrin-Dependent Endocytosis

[0400] Components of clathrin-mediated endocytosis pathway are key to modulating intracellular signaling and play important roles in disease. Chromosomal rearrangements that result in fusion transcripts between the Mixed-Lineage Leukemia gene (MLL) and CALM (clathrin assembly lymphoid myeloid leukemia gene) are believed to play a role in leukemogenesis. Similarly, disruptions in Rab7 and Rab9, as well as HIP1 (Huntingtin-interacting protein), genes that are believed to be involved in endocytosis, are potentially responsible for ailments resulting in lipid storage, and neuronal diseases, respectively. For these reasons, siRNA directed against clathrin and other genes involved in the clathrin-mediated endocytotic pathway are potentially important research and therapeutic tools.

[0401] siRNAs directed against genes involved in the clathrin-mediated endocytosis pathways were selected using Formula VIII. The targeted genes were clathrin heavy chain (CHC, accession # NM_{—}004859), clathrin light chain A (CLCa. NM_{—}001833), clathrin light chain B (CLCb, NM_{—}001834), CALM (U45976), β2 subunit of AP-2 (β2, NM_{—}001282), Eps15 (NM_{—}001981), Eps15R (NM_{—}021235), dynamin II (DYNII, NM_{—}004945), Rab5a (BC001267), Rab5b (NM_{—}002868), Rab5c (AF141304), and EEA.1 (XM_{—}018197).

[0402] For each gene, four siRNAs duplexes with the highest scores were selected and a BLAST search was conducted for each of them using the Human EST database. In order to minimize the potential for off-target silencing effects, only those sequences with more than three mismatches against un-related sequences were used. All duplexes were synthesized at Dharmacon, Inc. as 21-mers with 3′-UU overhangs using a modified method of 2′-ACE chemistry, Scaringe (2000) Advanced 5′-silyl-2′-orthoester approach to RNA oligonucleotide synthesis, Methods Enzymol. 317:3, and the antisense strand was chemically phosphorylated to insure maximized activity.

[0403] HeLa cells were grown in Dulbecco's modified Eagle's medium (DMEM) containing 10% fetal bovine serum, antibiotics and glutamine. siRNA duplexes were resuspended in 1×siRNA Universal buffer (Dharmacon, Inc.) to 20 μM prior to transfection. HeLa cells in 12-well plates were transfected twice with 4 μl of 20 μM siRNA duplex in 3 μl Lipofectamine 2000 reagent (Invitrogen, Carlsbad, Calif., USA) at 24-hour intervals. For the transfections in which 2 or 3 siRNA duplexes were included, the amount of each duplex was decreased, so that the total amount was the same as in transfections with single siRNAs. Cells were plated into normal culture medium 12 hours prior to experiments, and protein levels were measured 2 or 4 days after the first transfection.

[0404] Equal amounts of lysates were resolved by electrophoresis, blotted, and stained with the antibody specific to targeted protein, as well as antibodies specific to unrelated proteins, PP1 phosphatase and Tsg101 (not shown). The cells were lysed in Triton X-100/glycerol solubilization buffer as described previously. Tebar, Bohlander, & Sorkin (1999) Clathrin Assembly Lymphoid Myeloid Leukemia (CALM) Protein: Localization in Endocytic-coated Pits, Interactions with Clathrin, and the Impact of Overexpression on Clathrin-mediated Traffic, Mol. Biol. Cell, 10:2687. Cell lysates were electrophoresed, transferred to nitrocellulose membranes, and Western blotting was performed with several antibodies followed by detection using enhanced chemiluminescence system (Pierce, Inc). Several x-ray films were analyzed to determine the linear range of the chemiluminescence signals, and the quantifications were performed using densitometry and AlphaImager v5.5 software (Alpha Innotech Corporation). In experiments with Eps15R-targeted siRNAs, cell lysates were subjected to immunoprecipitation with Ab860, and Eps15R was detected in immunoprecipitates by Western blotting as described above.

[0405] The antibodies to assess the levels of each protein by Western blot were obtained from the following sources: monoclonal antibody to clathrin heavy chain (TD.1) was obtained from American Type Culture Collection (Rockville, Md., USA); polyclonal antibody to dynamin II was obtained from Affinity Bioreagents, Inc. (Golden, Colo., USA); monoclonal antibodies to EEA.1 and Rab5a were purchased from BD Transduction Laboratories (Los Angeles, Calif., USA); the monoclonal antibody to Tsg101 was purchased from Santa Cruz Biotechnology, Inc. (Santa Cruz, Calif., USA); the monoclonal antibody to GFP was from ZYMED Laboratories Inc. (South San Francisco, Calif., USA); the rabbit polyclonal antibodies Ab32 specific to α-adaptins and Ab20 to CALM were described previously (Sorkin et al. (1995) Stoichiometric Interaction of the Epidermal Growth Factor Receptor with the Clathrin-associated Protein Complex AP-2, J. Biol. Chem., 270:619), the polyclonal antibodies to clathrin light chains A and B were kindly provided by Dr. F. Brodsky (UCSF); monoclonal antibodies to PP1 (BD Transduction Laboratories) and α-Actinin (Chemicon) were kindly provided by Dr. M. Dell'Acqua (University of Colorado); Eps15 Ab577 and Eps15R Ab860 were kindly provided by Dr. P. P. Di Fiore (European Cancer Institute).

[0406] FIG. 11 demonstrates the in vivo functionality of 48 individual siRNAs, selected using Formula VIII (most of them will meet the criteria incorporated by Formula IX as well) targeting 12 genes. Various cell lines were transfected with siRNA duplexes (Dup1-4) or pools of siRNA duplexes (Pool), and the cells were lysed 3 days after transfection with the exception of CALM (2 days) and β2 (4 days).

[0407] Note a β1-adaptin band (part of AP-1 Golgi adaptor complex) that runs slightly slower than β2 adaptin. CALM has two splice variants, 66 and 72 kD. The full-length Eps15R (a doublet of 130 kD) and several truncated spliced forms of ˜100 kD and ˜70 kD were detected in Eps15R immunoprecipitates (shown by arrows). The cells were lysed 3 days after transfection. Equal amounts of lysates were resolved by electrophoresis and blotted with the antibody specific to a targeted protein (GFP antibody for YFP fusion proteins) and the antibody specific to unrelated proteins PP1 phosphatase or α-actinin, and TSG101. The amount of protein in each specific band was normalized to the amount of non-specific proteins in each lane of the gel. Nearly all of them appear to be functional, which establishes that Formula VIII and IX can be used to predict siRNAs' functionality in general in a genome wide manner.

[0408] To generate the fusion of yellow fluorescent protein (YFP) with Rab5b or Rab5c (YFP-Rab5b or YFP-Rab5c), a DNA fragment encoding the full-length human Rab5b or Rab5c was obtained by PCR using Pfu polymerase (Stratagene) with a SacI restriction site introduced into the 5′ end and a KpnI site into the 3′ end and cloned into pEYFP-C1 vector (CLONTECH, Palo Alto, Calif., USA). GFP-CALM and YFP-Rab5a were described previously (Tebar, Bohlander, & Sorkin (1999) Clathrin Assembly Lymphoid Myeloid Leukemia (CALM) Protein: Localization in Endocytic-coated Pits, Interactions with Clathrin, and the Impact of Overexpression on Clathrin-mediated Traffic, Mol. Biol. Cell 10:2687).

### Example IV

### Validation of the Algorithm Using Eg5, GADPH, ATE1, MEK2, MEK1, QB, Lamina/C, C-MYC, Human Cyclophilin, and Mouse Cyclophilin

[0409] A number of genes have been identified as playing potentially important roles in disease etiology. Expression profiles of normal and diseased kidneys has implicated Edg5 in immunoglobulin A neuropathy, a common renal glomerular disease. Myc1, MEK1/2 and other related kinases have been associated with one or more cancers, while lamins have been implicated in muscular dystrophy and other diseases. For these reasons, siRNA directed against the genes encoding these classes of molecules would be important research and therapeutic tools.

[0410] FIG. 12 illustrates four siRNAs targeting 10 different genes (Table V for sequence and accession number information) that were selected according to the Formula VIII and assayed as individuals and pools in HEK293 cells. The level of siRNA induced silencing was measured using the B-DNA assay. These studies demonstrated that thirty-six out of the forty individual SMART-selected siRNA tested are functional (90%) and all 10 pools are fully functional.

### Example V

### Validation of the Algorithm Using Bcl2

[0411] Bcl-2 is a ˜25 kD, 205-239 amino acid, anti-apoptotic protein that contains considerable homology with other members of the BCL family including BCLX, MCL1, BAX, BAD, and BIK. The protein exists in at least two forms (Bcl2a, which has a hydrophobic tail for membrane anchorage, and Bcl2b, which lacks the hydrophobic tail) and is predominantly localized to the mitochondrial membrane. While Bcl2 expression is widely distributed, particular interest has focused on the expression of this molecule in B and T cells. Bcl2 expression is down-regulated in normal germinal center B cells yet in a high percentage of follicular lymphomas, Bcl2 expression has been observed to be elevated. Cytological studies have identified a common translocation ((14;18)(q32;q32)) amongst a high percentage (>70%) of these lymphomas. This genetic lesion places the Bcl2 gene in juxtaposition to immunoglobulin heavy chain gene (IgH) encoding sequences and is believed to enforce inappropriate levels of gene expression, and resistance to programmed cell death in the follicle center B cells. In other cases, hypomethylation of the Bcl2 promoter leads to enhanced expression and again, inhibition of apoptosis. In addition to cancer, dysregulated expression of Bcl-2 has been correlated with multiple sclerosis and various neurological diseases.

[0412] The correlation between Bcl-2 translocation and cancer makes this gene an attractive target for RNAi. Identification of siRNA directed against the bcl2 transcript (or Bcl2-IgH fusions) would further our understanding Bcl2 gene function and possibly provide a future therapeutic agent to battle diseases that result from altered expression or function of this gene.

In Silico Identification of Functional siRNA

[0413] To identify functional and hyperfunctional siRNA against the Bcl2 gene, the sequence for Bcl-2 was downloaded from the NCBI Unigene database and analyzed using the Formula VIII algorithm. As a result of these procedures, both the sequence and SMARTSCORES™, or siRNA rankings of the Bcl2 siRNA were obtained and ranked according to their functionality. Subsequently, these sequences were BLAST'ed (database) to insure that the selected sequences were specific and contained minimal overlap with unrelated genes. The SMARTSCORES™, or siRNA rankings for the top 10 Bcl-2 siRNA are identified in FIG. 13.

### In Vivo Testing of Bcl-2 SiRNA

[0414] Bcl-2 siRNAs having the top ten SMARTSCORES™, or siRNA rankings were selected and tested in a functional assay to determine silencing efficiency. To accomplish this, each of the ten duplexes were synthesized using 2′-O-ACE chemistry and transfected at 100 nM concentrations into cells. Twenty-four hours later assays were performed on cell extracts to assess the degree of target silencing. Controls used in these experiments included mock transfected cells, and cells that were transfected with a non-specific siRNA duplex.

[0415] The results of these experiments are presented below (and in FIG. 14) and show that all ten of the selected siRNA induce 80% or better silencing of the Bcl2 message at 100 nM concentrations. These data verify that the algorithm successfully identified functional Bcl2 siRNA and provide a set of functional agents that can be used in experimental and therapeutic environments.

| | | |
|---|---|---|
| siRNA 1 | GGGAGAUAGUGAUGAAGUA | SEQ. ID NO. 302 |
| siRNA 2 | GAAGUACAUCCAUUAUAAG | SEQ. ID NO. 303 |
| siRNA 3 | GUACGACAACCGGGAGAUA | SEQ. ID NO. 304 |
| siRNA 4 | AGAUAGUGAUGAAGUACAU | SEQ. ID NO. 305 |
| siRNA 5 | UGAAGACUCUGCUCAGUUU | SEQ. ID NO. 306 |
| siRNA 6 | GCAUGCGGCCUCUGUUUGA | SEQ. ID NO. 307 |
| siRNA 7 | UGCGGCCUCUGUUUGAUUU | SEQ. ID NO. 308 |
| siRNA 8 | GAGAUAGUGAUGAAGUACA | SEQ. ID NO. 309 |
| siRNA 9 | GGAGAUAGUGAUGAAGUAC | SEQ. ID NO. 310 |
| siRNA 10 | GAAGACUCUGCUCAGUUUG | SEQ. ID NO. 311 |

[0416] Bcl2 siRNA: Sense Strand, 5′→3′

### Example VI

### Sequences Selected by the Algorithm

[0417] Sequences of the siRNAs selected using Formulas (Algorithms) VIII and IX with their corresponding ranking, which have been evaluated for the silencing activity in vivo in the present study (Formula VIII and IX, respectively) are shown in Table V. It should be noted that the “t” residues in Table V, and elsewhere, when referring to siRNA, should be replaced by “u” residues.

TABLE V

| | | | | | |
|---|---|---|---|---|---|
| | | | | FORMULA | FORMULA |
| GENE | Name | SEQ. ID No. | FTLLSEQTENCE | VIII | IX |

| | | | | | |
|---|---|---|---|---|---|
| CLTC | NM_004859 | 0312 | GAAAGAATCTGTAGAGAAA | 76 | 94.2 |
| CLTC | NM_004859 | 0313 | GCAATGAGCTCTTTGAAGA | 65 | 39.9 |
| CLTC | NM_004859 | 0314 | TGACAAAGGTGGATAAATT | 57 | 38.2 |
| CLTC | NM_004859 | 0315 | GGAAATGGATCTCTTTGAA | 54 | 49.4 |
| CLTA | NM_001833 | 0316 | GGAAAGTAATGGTCCAACA | 22 | 55.5 |
| CLTA | NM_001833 | 0317 | AGACAGTTATGCAGCTATT | 4 | 22.9 |
| CLTA | NM_001833 | 0318 | CCAATTCTCGGAAGCAAGA | 1 | 17 |
| CLTA | NM_001833 | 0319 | GAAAGTAATGGTCCAACAG | −1 | −13 |
| CLTB | NM_001834 | 0320 | GCGCCAGAGTGAACAAGTA | 17 | 57.5 |
| CLTB | NM_001834 | 0321 | GAAGGTGGCCCAGCTATGT | 15 | −8.6 |
| CLTB | NM_001834 | 0322 | GGAACCAGCGCCAGAGTGA | 13 | 40.5 |
| CLTB | NM_001834 | 0323 | GACCGAGATTGCACGCATA | 20 | 61.7 |
| CALM | U45976 | 0324 | GTTAGTATCTGATCACTTG | 36 | −34.6 |
| CALM | U45976 | 0325 | GAAATGGAACCACTAAGAA | 33 | 46.1 |
| CALM | U45976 | 0326 | GGAAATGGAACCACTAAGA | 30 | 61.2 |
| CALM | U45976 | 0327 | CAACTACACTTTCCAATGC | 28 | 6.8 |
| EPS15 | NM_001981 | 0328 | CCACCAAGATTTCATGATA | 48 | 25.2 |
| EPS15 | NM_001981 | 0329 | GATCGGAACTCCAACAAGA | 43 | 49.3 |
| EPS15 | NM_001981 | 0330 | AAACGGAGCTACAGATTAT | 39 | 11.5 |
| EPS15 | NM_001981 | 0331 | CCACACAGCATTCTTGTAA | 33 | −23.6 |
| EPS15R | NM_021235 | 0332 | GAAGTTACCTTGAGCAATC | 48 | 33 |
| EPS15R | NM_021235 | 0333 | GGACTTGGCCGATCCAGAA | 27 | 33 |
| EPS1SR | NM_021235 | 0334 | GCACTTGGATCGAGATGAG | 20 | 1.3 |
| EPS15R | NM_021235 | 0335 | CAAAGACCAATTCGCGTTA | 17 | 27.7 |
| DNM2 | NM_004945 | 0336 | CCGAATCAATCGCATCTTC | 6 | −29.6 |
| DNM2 | NM_004945 | 0337 | GACATGATCCTGCAGTTCA | 5 | −14 |
| DNM2 | NM_004945 | 0338 | GAGCGAATCGTCACCACTT | 5 | 24 |
| DNM2 | NM_004945 | 0339 | CCTCCGAGCTGGCGTCTAC | −4 | −63.6 |
| ARF6 | AF93885 | 0340 | TCACATGGTTAACCTCTAA | 27 | −21.1 |
| ARF6 | AF93885 | 0341 | GATGAGGGACGCCATAATC | 7 | −38.4 |
| ARF6 | AF93885 | 0342 | CCTCTAACTACAAATCTTA | 4 | 16.9 |
| ARF6 | AF93885 | 0343 | GGAAGGTGCTATCCAAAAT | 4 | 11.5 |
| RAB5A | BC001267 | 0344 | GCAAGCAAGTCCTAACATT | 40 | 25.1 |
| RAB5A | BC001267 | 0345 | GGAAGAGGAGTAGACCTTA | 17 | 50.1 |
| RAB5A | BC001267 | 0346 | AGGAATCAGTGTTGTAGTA | 16 | 11.5 |
| RAB5A | BC001267 | 0347 | GAAGAGGAGTAGACCTTAC | 12 | 7 |
| RAB5B | NM_002868 | 0348 | GAAAGTCAAGCCTGGTATT | 14 | 18.1 |
| RAB5B | NM_002868 | 0349 | AAAGTCAAGCCTGGTATTA | 6 | −17.8 |
| RAB5B | NM_002868 | 0350 | GCTATGAACGTGAATGATC | 3 | −21.1 |
| RAB5B | NM_002868 | 0351 | CAAGCCTGGTATTACGTTT | −7 | −37.5 |
| RAB5C | AF141304 | 0352 | GGAACAAGATCTGTCAATT | 38 | 51.9 |
| RAB5C | AF141304 | 0353 | GCAATGAACGTGAACGAAA | 29 | 43.7 |
| RAB5C | AF141304 | 0354 | CAATGAACGTGAACGAAAT | 18 | 43.3 |
| RAB5C | AF141304 | 0355 | GGACAGGAGCGGTATCACA | 6 | 18.2 |
| EEA1 | XM_018197 | 0356 | AGACAGAGCTTGAGAATAA | 67 | 64.1 |
| EEA1 | XM_018197 | 0357 | GAGAAGATCTTTATGCAAA | 60 | 48.7 |
| EEA1 | XM_018197 | 0358 | GAAGAGAAATCAGCAGATA | 58 | 45.7 |
| EEA1 | XM_018197 | 0359 | GCAAGTAACTCAACTAACA | 56 | 72.3 |
| AP2B1 | NM_001282 | 0360 | GAGCTAATCTGCCACATTG | 49 | −12.4 |
| AP2B1 | NM_001282 | 0361 | GCAGATGAGTTACTAGAAA | 44 | 48.9 |
| AP2B1 | NM_001282 | 0362 | CAACTTAATTGTCCAGAAA | 41 | 28.2 |
| AP2B1 | NM_001282 | 0363 | CAACACAGGATTCTGATAA | 33 | −5.8 |
| PLK | NM_005030 | 0364 | AGATTGTGCCTAAGTCTCT | −35 | −3.4 |
| PLK | NM0_05030 | 0365 | ATGAAGATCTGGAGGTGAA | 0 | −4.3 |
| PLK | NM_005030 | 0366 | TTTGAGACTTCTTGCCTAA | −5 | −27.7 |
| PLK | NM_005030 | 0367 | AGATCACCCTCCTTAAATA | 15 | 72.3 |
| GAPDH | NM_002046 | 0368 | CAACGGATTTGGTCGTATT | 27 | −2.8 |
| GAPDH | NM_002046 | 0369 | GAAATCCCATCACCATCTT | 24 | 3.9 |
| GAPDH | NM_002046 | 0370 | GACCTCAACTACATGGTTT | 22 | −22.9 |
| GAPDH | NM_002046 | 0371 | TGGTTTACATGTTCCAATA | 9 | 9.8 |
| c-Myc | | 0372 | GAAGAAATCGATGTTGTTT | 31 | −11.7 |
| c-Myc | | 0373 | ACACAAACTTGAACAGCTA | 22 | 51.3 |
| c-Myc | | 0374 | GGAAGAAATCGATGTTGTT | 18 | 26 |
| c-Myc | | 0375 | GAAACGACGAGAACAGTTG | 18 | −8.9 |
| MAP2K1 | NM_002755 | 0376 | GCACATGGATGGAGGTTCT | 26 | 16 |
| MAP2K1 | NM_002755 | 0377 | GCAGAGAGAGCAGATTTGA | 16 | 0.4 |
| MAP2K1 | NM_002755 | 0378 | GAGGTTCTCTGGATCAAGT | 14 | 15.5 |
| MAP2K1 | NM_002755 | 0379 | GAGCAGATTTGAAGCAACT | 14 | 18.5 |
| MAP2K2 | NM_030662 | 0380 | CAAAGACGATGACTTCGAA | 37 | 26.4 |
| MAP2K2 | NM_030662 | 0381 | GATCAGCATTTGCATGGAA | 24 | −0.7 |
| MAP2K2 | NM_030662 | 0382 | TCCAGGAGTTTGTCAATAA | 17 | −4.5 |
| MAP2K2 | NM_030662 | 0383 | GGAAGCTGATCCACCTTGA | 16 | 59.2 |
| KNSL1(EG5) | NM_004523 | 0384 | GCAGAAATCTAAGGATATA | 53 | 35.8 |
| KNSL1(EG5) | NM_004523 | 0385 | CAACAAGGATGAAGTCTAT | 50 | 18.3 |
| KNSL1(EG5) | NM_004523 | 0386 | CAGCAGAAATCTAAGGATA | 41 | 32.7 |
| KNSL1(EG5) | NM_004523 | 0387 | CTAGATGGCTTTCTCAGTA | 39 | 3.9 |
| CyclophilinA | NM_021130 | 0388 | AGACAAGGTCCCAAAGACA | −16 | 58.1 |
| CyclophilinA | NM_021130 | 0389 | GGAATGGCAAGACCAGCAA | −6 | 36 |
| CyclophilinA | NM_021130 | 0390 | AGAATTATTCCACGGTTTA | −3 | 16.1 |
| CyclophilinA | NM_021130 | 0391 | GCACACAAGGTCCCAAAGA | 8 | 8.9 |
| LAMIN A/C | NM_170707 | 0392 | AGAACCAGCTTCAGGATGA | 31 | 38.8 |
| LAMIN A/C | NM_170707 | 0393 | GACCTTGACTTCCAGAAGA | 33 | 22.4 |
| LAMIN A/C | NM_170707 | 0394 | CCACCGAAGTTCACCCTAA | 21 | 27.5 |
| LAMIN A/C | NM_170707 | 0395 | GAGAAGAGCTCCTCCATCA | 55 | 30.1 |
| CyclophilinB | M60857 | 0396 | GAAAGAGCATCTACGGTGA | 41 | 83.9 |
| CyclophilinB | M60857 | 0397 | GAAAGGATTTGGCTACAAA | 53 | 59.1 |
| CyclophilinB | M60857 | 0398 | ACAGCAAATTCCATCGTGT | −20 | 28.8 |
| CyclophilinB | M60857 | 0399 | GGAAAGACTGTTCCAAAAA | 2 | 27 |
| DBI1 | NM_020548 | 0400 | CAACACGCCTCATCCTCTA | 27 | −7.6 |
| DBI2 | NM_020548 | 0401 | CATGAAAGCTTACATCAAC | 25 | −30.8 |
| DBI3 | NM_020548 | 0402 | AAGATGCCATGAAAGCTTA | 17 | 22 |
| DBI4 | NM_020548 | 0403 | GCACATACCGCCTGAGTCT | 15 | 3.9 |
| rLUC1 | | 0404 | GATCAAATCTGAAGAAGGA | 57 | 49.2 |
| rLUC2 | | 0405 | GCCAAGAAGTTTCCTAATA | 50 | 13.7 |
| rLUC3 | | 0406 | CAGCATATCTTGAACCATT | 41 | −2.2 |
| rLUC4 | | 0407 | GAACAAAGGAAACGGATGA | 39 | 29.2 |
| SeAP1 | NM_031313 | 0408 | CGGAAACGGTCCAGGCTAT | 6 | 26.9 |
| SeAP2 | NM_031313 | 0409 | GCTTCGAGCAGACATGATA | 4 | −11.2 |
| SeAP3 | NM_031313 | 0410 | CCTACACGGTCCTCCTATA | 4 | 4.9 |
| SeAP4 | NM_031313 | 0411 | GCCAAGAACCTCATCATCT | 1 | −9.9 |
| fLUC1 | | 0412 | GATATGGGCTGAATACAAA | 54 | 40.4 |
| fLUC2 | | 0413 | GCACTCTGATTGACAAATA | 47 | 54.7 |
| fLUC3 | | 0414 | TGAAGTCTCTGATTAAGTA | 46 | 34.5 |
| fLUC4 | | 0415 | TCAGAGAGATCCTCATAAA | 40 | 11.4 |
| mCyclo_1 | NM_008907 | 0416 | GCAAGAAGATCACCATTTC | 52 | 46.4 |
| mCyclo_2 | NM_008907 | 0417 | GAGAGAAATTTGAGGATGA | 36 | 70.7 |
| mCyclo_3 | NM_008907 | 0418 | GAAAGGATTTGGCTATAAG | 35 | −1.5 |
| mCyclo_4 | NM_008907 | 0419 | GAAAGAAGGCATGAACATT | 27 | 10.3 |
| BCL2_1 | NM_000633 | 0420 | GGGACATAGTGATGAAGTA | 21 | 72 |
| BCL2_2 | NM_000633 | 0421 | GAAGTACATCCATTATAAG | 1 | 3.3 |
| BCL2_3 | NM_000633 | 0422 | GTACGACAACCGGGAGATA | 1 | 35.9 |
| BCL2_4 | NM_000633 | 0423 | AGATAGTGATGAAGTACAT | −12 | 22.1 |
| BCL2_5 | NM_000633 | 0424 | TGAAGACTCTGCTCAGTTT | 36 | 19.1 |
| BCL2_6 | NM_000633 | 0425 | GCATGCGGCCTCTGTTTGA | 5 | −9.7 |
| QB1 | NM_003365.1 | 0426 | GCACACAGCUUACUACAUC | 52 | −4.8 |
| QB2 | NM_003365.1 | 0427 | GAAAUGCCCUGGUAUCUCA | 49 | 22.1 |
| QB3 | NM_003365.1 | 0428 | GAAGGAACGUGAUGUGAUC | 34 | 22.9 |
| QB4 | NM_003365.1 | 0429 | GCACUACUCCUGUGUGUGA | 28 | 20.4 |
| ATE1-1 | NM_007041 | 0430 | GAACCCAGCUGGAGAACUU | 45 | 15.5 |
| ATE1-2 | NM_007041 | 0431 | GAUAUACAGUGUGAUCUUA | 40 | 12.2 |
| ATE1-3 | NM_007041 | 0432 | GUACUACGAUCCUGAUUAU | 37 | 32.9 |
| ATE1-4 | NM_007041 | 0433 | GUGCCGACCUUUACAAUUU | 35 | 18.2 |
| EGFR-1 | NM_005228 | 0434 | GAAGGAAACTGAATTCAAA | 68 | 79.4 |
| EGFR-1 | NM_005228 | 0435 | GGAAATATGTACTACGAAA | 49 | 49.5 |
| EGFR-1 | NM_005228 | 0436 | CCACAAAGCAGTGAATTTA | 41 | 7.6 |
| EGFR-1 | NM_005228 | 0437 | GTAACAAGCTCACGCAGTT | 40 | 25.9 |

[0418] Many of the genes to which the described siRNA are directed play critical roles in disease etiology. For this reason, the siRNAs listed in the sequence listing may potentially act as therapeutic agents. A number of prophetic examples follow and should be understood in view of the siRNA that are identified in the sequence listing. To isolate these siRNAs, the appropriate message sequence for each gene is analyzed using one of the before mentioned formulas (preferably formula VIII) to identify potential siRNA targets. Subsequently these targets are BLAST'ed to eliminate homology with potential off-targets.

### Example VII

### Evidence for the Benefits of Pooling

[0419] Evidence for the benefits of pooling have been demonstrated using the reporter gene, luciferase. Ninety siRNA duplexes were synthesized using Dharmacon proprietary ACE® chemistry against one of the standard reporter genes: firefly luciferase. The duplexes were designed to start two base pairs apart and to cover approximately 180 base pairs of the luciferase gene (see sequences in Table III). Subsequently, the siRNA duplexes were co-transfected with a luciferase expression reporter plasmid into HEK293 cells using standard transfection protocols and luciferase activity was assayed at 24 and 48 hours.

[0420] Transfection of individual siRNAs showed standard distribution of inhibitory effect. Some duplexes were active, while others were not. FIG. 15 represents a typical screen of ninety siRNA duplexes (SEQ. ID NO. 0032-0120) positioned two base pairs apart. As the figure suggests, the functionality of the siRNA duplex is determined more by a particular sequence of the oligonucleotide than by the relative oligonucleotide position within a gene or excessively sensitive part of the mRNA, which is important for traditional anti-sense technology.

[0421] When two continuous oligonucleotides were pooled together, a significant increase in gene silencing activity was observed (see FIGS. 16A and B). A gradual increase in efficacy and the frequency of pools functionality was observed when the number of siRNAs increased to 3 and 4 (FIGS. 16A, 16B, 17A, and 17B). Further, the relative positioning of the oligonucleotides within a pool did not determine whether a particular pool was functional (see FIGS. 18A and 18B, in which 100% of pools of oligonucleotides distanced by 2, 10 and 20 base pairs were functional).

[0422] However, relative positioning may nonetheless have an impact. An increased functionality may exist when the siRNA are positioned continuously head to toe (5′ end of one directly adjacent to the 3′ end of the others).

[0423] Additionally, siRNA pools that were tested performed at least as well as the best oligonucleotide in the pool, under the experimental conditions whose results are depicted in FIG. 19. Moreover, when previously identified non-functional and marginally (semi) functional siRNA duplexes were pooled together in groups of five at a time, a significant functional cooperative action was observed (see FIG. 20). In fact, pools of semi-active oligonucleotides were 5 to 25 times more functional than the most potent oligonucleotide in the pool. Therefore, pooling several siRNA duplexes together does not interfere with the functionality of the most potent siRNAs within a pool, and pooling provides an unexpected significant increase in overall functionality

### Example VIII

### Additional Evidence of the Benefits of Pooling

[0424] Experiments were performed on the following genes: β-galactosidase, Renilla luciferase, and Secreted alkaline phosphatase, which demonstrates the benefits of pooling. (see FIGS. 21A, 21B and 21C). Individual and pools of siRNA (described in Figure legends 21A-C) were transfected into cells and tested for silencing efficiency. Approximately 50% of individual siRNAs designed to silence the above-specified genes were functional, while 100% of the pools that contain the same siRNA duplexes were functional.

### Example IX

### Highly Functional siRNA

[0425] Pools of five siRNAs in which each two siRNAs overlap to 10-90% resulted in 98% functional entities (>80% silencing). Pools of siRNAs distributed throughout the mRNA that were evenly spaced, covering an approximate 20-2000 base pair range, were also functional. When the pools of siRNA were positioned continuously head to tail relative to mRNA sequences and mimicked the natural products of Dicer cleaved long double stranded RNA, 98% of the pools evidenced highly functional activity (>95% silencing).

### Example X

### Human Cyclophilin B

[0426] Table III above lists the siRNA sequences for the human cyclophilin B protein. A particularly functional siRNA may be selected by applying these sequences to any of Formula I to VII above.

[0427] Alternatively, one could pool 2, 3, 4, 5 or more of these sequences to create a kit for silencing a gene. Preferably, within the kit there would be at least one sequence that has a relatively high predicted functionality when any of Formulas I-VII is applied.

### Example XI

### Sample Pools of siRNAs and their Application to Human Disease

[0428] The genetic basis behind human disease is well documented and siRNA may be used as both research or diagnostic tools and therapeutic agents, either individually or in pools. Genes involved in signal transduction, the immune response, apoptosis, DNA repair, cell cycle control, and a variety of other physiological functions have clinical relevance and therapeutic agents that can modulate expression of these genes may alleviate some or all of the associated symptoms. In some instances, these genes can be described as a member of a family or class of genes and siRNA (randomly, conventionally, or rationally designed) can be directed against one or multiple members of the family to induce a desired result.

[0429] To identify rationally designed siRNA to each gene, the sequence was analyzed using Formula VIII or Formula X to identify rationally designed siRNA. To confirm the activity of these sequences, the siRNA are introduced into a cell type of choice (e.g., HeLa cells, HEK293 cells) and the levels of the appropriate message are analyzed using one of several art proven techniques. siRNA having heightened levels of potency can be identified by testing each of the before mentioned duplexes at increasingly limiting concentrations. Similarly, siRNA having increased levels of longevity can be identified by introducing each duplex into cells and testing functionality at 24, 48, 72, 96, 120, 144, 168, and 192 hours after transfection. Agents that induce >95% silencing at sub-nanomolar concentrations and/or induce functional levels of silencing for >96 hours are considered hyperfunctional.

### Example XII

### Validation of Multigene Knockout Using Rab5 and Eps

[0430] Two or more genes having similar, overlapping functions often leads to genetic redundancy. Mutations that knockout only one of, e.g., a pair of such genes (also referred to as homologs) results in little or no phenotype due to the fact that the remaining intact gene is capable of fulfilling the role of the disrupted counterpart. To fully understand the function of such genes in cellular physiology, it is often necessary to knockout or knockdown both homologs simultaneously. Unfortunately, concomitant knockdown of two or more genes is frequently difficult to achieve in higher organisms (e.g., mice) thus it is necessary to introduce new technologies dissect gene function. One such approach to knocking down multiple genes simultaneously is by using siRNA. For example, FIG. 11 showed that rationally designed siRNA directed against a number of genes involved in the clathrin-mediated endocytosis pathway resulted in significant levels of protein reduction (e.g., >80%). To determine the effects of gene knockdown on clathrin-related endocytosis, internalization assays were performed using epidermal growth factor and transferrin. Specifically, mouse receptor-grade EGF (Collaborative Research Inc.) and iron-saturated human transferrin (Sigma) were iodinated as described previously (Jiang, X., Huang, F., Marusyk, A. & Sorkin, A. (2003) Mol Biol Cell 14, 858-70). HeLa cells grown in 12-well dishes were incubated with ¹²⁵I-EGF (1 ng/ml) or ¹²⁵I-transferrin (1 μg/ml) in binding medium (DM EM, 0.1% bovine serum albumin) at 37° C., and the ratio of internalized and surface radioactivity was determined during 5-min time course to calculate specific internalization rate constant kₑ as described previously (Jiang, X et al.). The measurements of the uptakes of radiolabeled transferrin and EGF were performed using short time-course assays to avoid influence of the recycling on the uptake kinetics, and using low ligand concentration to avoid saturation of the clathrin-dependent pathway (for EGF Lund, K. A., Opresko, L. K., Strarbuck, C., Walsh, B. J. & Wiley, H. S. (1990) J. Biol. Chem. 265, 15713-13723).

[0431] The effects of knocking down Rab5a, 5b, 5c, Eps, or Eps 15R (individually) are shown in FIG. 22 and demonstrate that disruption of single genes has little or no effect on EGF or Tfn internalization. In contrast, simultaneous knock down of Rab5a, 5b, and 5c, or Eps and Eps 15R, leads to a distinct phenotype (note: total concentration of siRNA in these experiments remained constant with that in experiments in which a single siRNA was introduced, see FIG. 23). These experiments demonstrate the effectiveness of using rationally designed siRNA to knockdown multiple genes and validates the utility of these reagents to override genetic redundancy.

### Example XIII

### Validation of Multigene Targeting Using G6PD, GAPDH, PLK, and UQC

[0432] Further demonstration of the ability to knock down expression of multiple genes using rationally designed siRNA was performed using pools of siRNA directed against four separate genes. To achieve this, siRNA were transfected into cells (total siRNA concentration of 100 nM) and assayed twenty-four hours later by B-DNA. Results shown in FIG. 24 show that pools of rationally designed molecules are capable of simultaneously silencing four different genes.

### Example XIV

### Validation of Multigene Knockouts as Demonstrated by Gene Expression Profiling, a Prophetic Example

[0433] To further demonstrate the ability to concomitantly knockdown the expression of multiple gene targets, single siRNA or siRNA pools directed against a collection of genes (e.g., 4, 8, 16, or 23 different targets) are simultaneously transfected into cells and cultured for twenty-four hours. Subsequently, mRNA is harvested from treated (and untreated) cells and labeled with one of two fluorescent probes dyes (e.g., a red fluorescent probe for the treated cells, a green fluorescent probe for the control cells.). Equivalent amounts of labeled RNA from each sample is then mixed together and hybridized to sequences that have been linked to a solid support (e.g., a slide, “DNA CHIP”). Following hybridization, the slides are washed and analyzed to assess changes in the levels of target genes induced by siRNA.

### Example XV

### Identifying Hyperfunctional siRNA

[0434] Identification of Hyperfunctional Bcl-2 siRNA

[0435] The ten rationally designed Bcl2 siRNA (identified in FIG. 13, 14) were tested to identify hyperpotent reagents. To accomplish this, each of the ten Bcl-2 siRNA were individually transfected into cells at a 300 pM (0.3 nM) concentrations. Twenty-four hours later, transcript levels were assessed by B-DNA assays and compared with relevant controls. As shown in FIG. 25, while the majority of Bcl-2 siRNA failed to induce functional levels of silencing at this concentration, siRNA 1 and 8 induced >80% silencing, and siRNA 6 exhibited greater than 90% silencing at this subnanomolar concentration.

By way of prophetic examples, similar assays could be performed with any of the groups of rationally designed genes described in the Examples. Thus for instance, rationally designed siRNA sequences directed against a gene of interest could be introduced into cells at increasingly limiting concentrations to determine whether any of the duplexes are hyperfunctional.

### Example XVI

### Gene Silencing

### Prophetic Example

[0436] Below is an example of how one might transfect a cell.

[0437] Select a cell line. The selection of a cell line is usually determined by the desired application. The most important feature to RNAi is the level of expression of the gene of interest. It is highly recommended to use cell lines for which siRNA transfection conditions have been specified and validated.

[0438] Plate the cells. Approximately 24 hours prior to transfection, plate the cells at the appropriate density so that they will be approximately 70-90% confluent, or approximately 1×10⁵ cells/ml at the time of transfection. Cell densities that are too low may lead to toxicity due to excess exposure and uptake of transfection reagent-siRNA complexes. Cell densities that are too high may lead to low transfection efficiencies and little or no silencing. Incubate the cells overnight. Standard incubation conditions for mammalian cells are 37° C. in 5% CO₂. Other cell types, such as insect cells, require different temperatures and CO₂ concentrations that are readily ascertainable by persons skilled in the art. Use conditions appropriate for the cell type of interest.

[0439] siRNA re-suspension. Add 20 μl siRNA universal buffer to each siRNA to generate a final concentration of 50 μM.

[0440] siRNA-lipid complex formation. Use RNase-free solutions and tubes. Using the following table, Table XI:

TABLE XI

| | |
|---|---|
| 96-WELL | 24-WELL |

MIXTURE 1 (TRANSIT-TKO-PLASMID DILUTION MIXTURE)

| | | | | |
|---|---|---|---|---|
| Opti-MEM | 9.3 | μl | 46.5 | μl |
| TransIT-TKO (1 μg/μl) | 0.5 | μl | 2.5 | μl |
| MIXTURE 1 | 10.0 | μl | 50.0 | μl |
| FINAL VOLUME | | | | |

MIXTURE 2 (SIRNA DILUTION MIXTURE)

| | | | | |
|---|---|---|---|---|
| Opti-MEM | 9.0 | μl | 45.0 | μl |
| siRNA (1 μM) | 1.0 | μl | 5.0 | μl |
| MIXTURE 2 | 10.0 | μl | 50.0 | μl |
| FINAL VOLUME | | | | |

MIXTURE 3 (SIRNA-TRANSFECTION REAGENT MIXTURE)

| | | | | |
|---|---|---|---|---|
| Mixture 1 | 10 | μl | 50 | μl |
| Mixture 2 | 10 | μl | 50 | μl |
| MIXTURE 3 | 20 | μl | 100 | μl |
| FINAL VOLUME | | | | |

Incubate 20 minutes at room temperature

MIXTURE 4 (MEDIA-SIRNA/TRANSFECTION
REAGENT MIXTURE)

| | | | | |
|---|---|---|---|---|
| Mixture 3 | 20 | μl | 100 | μl |
| Complete media | 80 | μl | 400 | μl |
| MIXTURE 4 | 100 | μl | 500 | μl |
| FINAL VOLUME | | | | |

Incubate 48 hours at 37° C.

[0441] Transfection. Create a Mixture 1 by combining the specified amounts of OPTI-MEM serum free media and transfection reagent in a sterile polystyrene tube. Create a Mixture 2 by combining specified amounts of each siRNA with OPTI-MEM media in sterile 1 ml tubes. Create a Mixture 3 by combining specified amounts of Mixture I and Mixture 2. Mix gently (do not vortex) and incubate at room temperature for 20 minutes. Create a Mixture 4 by combining specified amounts of Mixture 3 to complete media. Add appropriate volume to each cell culture well. Incubate cells with transfection reagent mixture for 24-72 hours at 37° C. This incubation time is flexible. The ratio of silencing will remain consistent at any point in the time period. Assay for gene silencing using an appropriate detection method such as RT-PCR, Western blot analysis, immunohistochemistry, phenotypic analysis, mass spectrometry, fluorescence, radioactive decay, or any other method that is now known or that comes to be known to persons skilled in the art and that from reading this disclosure would useful with the present invention. The optimal window for observing a knockdown phenotype is related to the mRNA turnover of the gene of interest, although 24-72 hours is standard. Final Volume reflects amount needed in each well for the desired cell culture format. When adjusting volumes for a Stock Mix, an additional 10% should be used to accommodate variability in pipetting, etc. Duplicate or triplicate assays should be carried out when possible.

### Example XVII

### siRNAs that Target Nucleotide Sequences for Phosphatases

[0442] siRNAs that target phosphatase sequences with the NCBI accession numbers denoted below and having sequences generated in silico by the algorithms herein, are provided. In various embodiments, the siRNAs are rationally designed. In various embodiments, the siRNAs are functional or hyperfunctional. These siRNA that have been generated by the algorithms of the present invention include:

| SEQ | | | |
|---|---|---|---|
| ID | | | |
| NO | Name | siRNASense | Accession |
| 438 | ACP1 | CCAUAAAGCAAGACAGAUU | NM_007099 |
| 439 | ACP1 | CCUAAGAAAUCAUGGCAUU | NM_007099 |
| 440 | ACP1 | GGGAAGAGAGAAACAUUUA | NM_004300 |
| 441 | ACP1 | GCGGGAAGAUGGCGGAACA | NM_007099 |
| 442 | ACP1 | GUUAAAACCUGCAAAGCUA | NM_004300 |
| 443 | ACP1 | GCACACUUGUAUAUUGAAA | NM_004300 |
| 444 | ACP1 | GAGAGAAACAUUUAUGGAA | NM_007099 |
| 445 | ACP1 | GCAGAUUACCAAAGAAGAU | NM_004300 |
| 446 | ACP1 | CAGAAGCAGUUUUCAGGAA | NM_007099 |
| 447 | ACP1 | GGGUAACAUUUGUCGAUCA | NM_007099 |
| 448 | ACP1 | UAUGGUCAGUUGAGGAAUA | NM_004300 |
| 449 | ACP1 | ACCCAAAUGUCCAAUAUAA | NM_007099 |
| 450 | ACP1 | GAGAAACAUUUAUGGAAUC | NM_004300 |
| 451 | ACP1 | GGAUGAAAGCAAUCUGAGA | NM_004300 |
| 452 | ACP1 | UAGUAGAACAAGCAACAUA | NM_004300 |
| 453 | ACP1 | CUGAGAGAUUUGAAUAGAA | NM_004300 |
| 454 | ACP1 | CGUAGGAGCUCACAGUCUA | NM_004300 |
| 455 | ACP1 | GAUAGGGAAGAGAGAAACA | NM_004300 |
| 456 | ACP1 | AGUAGAACAAGCAACAUAA | NM_004300 |
| 457 | ACP1 | CAUAAAGCAAGACAGAUUA | NM_007099 |
| 458 | ACP1 | GCCCAUAAAGCAAGACAGA | NM_007099 |
| 459 | ACP1 | AUAGGCAGAUGUAAGGUAA | NM_007099 |
| 460 | ACP1 | CUGCAAAGCUAAAAUUGAA | NM_004300 |
| 461 | ACP1 | AUGAAAGCAAUCUGAGAGA | NM_004300 |
| 462 | ACP1 | GAAAGAAGGACACUUGUAU | NM_004300 |
| 463 | ACP1 | AAUAGUAGAACAAGCAACA | NM_004300 |
| 464 | ACP1 | AUGUAUGGAUGAAAGCAAU | NM_004300 |
| 465 | ACP1 | GAAGGACACUUGUAUGCUA | NM_007099 |
| 466 | ACP1 | AGAAAGAAGGACACUUGUA | NM_004300 |
| 467 | ACP1 | AGGCAGAUGUAAGGUAAUU | NM_004300 |
| 468 | ACP2 | GGACCUAGGAUUAGAAAAU | NM_001610 |
| 469 | ACP2 | AGGAAGAACCUGACCCUAA | NM_001610 |
| 470 | ACP2 | GCGUGAACCUGGUGGUGAU | NM_001610 |
| 471 | ACP2 | AGACAGAAUGCUUCAGGAA | NM_001610 |
| 472 | ACP2 | GAGAAUGAAUAGUGCUGUU | NM_001610 |
| 473 | ACP2 | UGUCUACAAUGGUGAACAA | NM_001610 |
| 474 | ACP2 | ACAGAAUGCUUCAGGAAUC | NM_001610 |
| 475 | ACP2 | GCAAGAGGUUUAUGUGCGA | NM_001610 |
| 476 | ACP2 | CACCAGAGUAUCAGAAUGA | NM_001610 |
| 477 | ACP2 | GUUAUGAGCAGCUGCAGAA | NM_001610 |
| 478 | ACP2 | CACUCAGGACCUAGGAUUA | NM_001610 |
| 479 | ACP2 | AGGACAGGCUGCUGAAGUU | NM_001610 |
| 480 | ACP2 | CUGCAGACACAGAGGUGAU | NM_001610 |
| 481 | ACP2 | GGAAGAACCUGACCCUAAU | NM_001610 |
| 482 | ACP2 | CAGAUAAGGAAGAACCUGA | NM_001610 |
| 483 | ACP2 | CCGGCAGACACCAGAGUAU | NM_001610 |
| 484 | ACP2 | CAGAGGUGAUUGUGGCCUU | NM_001610 |
| 485 | ACP2 | CCAGAGUAUCAGAAUGAGA | NM_001610 |
| 486 | ACP2 | AUGCACAAUUUCUGGACAU | NM_001610 |
| 487 | ACP2 | CCAACGGGAUGCAGCGCUU | NM_001610 |
| 488 | ACP2 | GUUGUGAGCUGGAAAAGAA | NM_001610 |
| 489 | ACP2 | GGAAGGGAGUUGCUUGUCA | NM_001610 |
| 490 | ACP2 | UCAUGAGUGCUGAGGCCAA | NM_001610 |
| 491 | ACP2 | CAGUGAAGACAUAUCCCAA | NM_001610 |
| 492 | ACP2 | CCACAUAUUUGAACUGUAC | NM_001610 |
| 493 | ACP2 | GAGCAGGACGGAAGGUUGU | NM_001610 |
| 494 | ACP2 | GGACCACGCCUGACAACCA | NM_001610 |
| 495 | ACP2 | AUGAGCAGCUGCAGAACGA | NM_001610 |
| 496 | ACP2 | GACAGAAUGCUUCAGGAAU | NM_001610 |
| 497 | ACP2 | GGACACUGGCUUUCUCCAA | NM_001610 |
| 498 | ACP2 | GGUACGUGCUAGCCGGAAA | NM_001611 |
| 499 | ACP5 | GGGAAACACAGCUGAUGAA | NM_001611 |
| 500 | ACP5 | GAGAUCAGCUCCAAAGAGA | NM_001611 |
| 501 | ACP5 | GCUUUGUAGCCGUGGGUGA | NM_001611 |
| 502 | ACP5 | UGUCCUGGCUCAAGAAACA | NM_001611 |
| 503 | ACP5 | GACAAGAGGUUCCAGGAGA | NM_001611 |
| 504 | ACP5 | AUGAGAAUGGCGUGGGCUA | NM_001611 |
| 505 | ACP5 | GUGCAAGACAUCAAUGACA | NM_001611 |
| 506 | ACP5 | UGCAAGACAUCAAUGACAA | NM_001611 |
| 507 | ACP5 | CCUCCUAAAUCAAGCAUCU | NM_001611 |
| 508 | ACP5 | ACAUCAAUGACAAGAGGUU | NM_001611 |
| 509 | ACP5 | GUACCUGCAAGAUGAGAAU | NM_001611 |
| 510 | ACP5 | UUACUUCACUGGUGUGCAA | NM_001611 |
| 511 | ACP5 | CUAUGGGACUGAAGACUCA | NM_001611 |
| 512 | ACP5 | UCAAGAUCCCACAGACCAA | NM_001611 |
| 513 | ACP5 | UGUCCCAGCCACAGUGUUA | NM_001611 |
| 514 | ACP5 | GCUCCAAAGAGAUGACUGU | NM_001611 |
| 515 | ACP5 | CAAAGCGGCACCAGCGCAA | NM_001611 |
| 516 | ACP5 | CCAAUGUGUCUGUGGCCAU | NM_001611 |
| 517 | ACP5 | CGGGCAAGUCCCUCUUUAA | NM_001611 |
| 518 | ACP5 | AAACACAGCUGAUGAACUG | NM_001611 |
| 519 | ACP5 | GAAACACAGCUGAUGAACU | NM_001611 |
| 520 | ACP5 | GCACAGAUGCCCACGUAUG | NM_001611 |
| 521 | ACP5 | GAUCCUGGGUGCAGACUUC | NM_001611 |
| 522 | ACP5 | UCACUGGUGUGCAAGACAU | NM_001611 |
| 523 | ACP5 | GAUCAGCUCCAAAGAGAUG | NM_001611 |
| 524 | ACP5 | CAGAUUGCAUACUCUAAGA | NM_001611 |
| 525 | ACP5 | GACACUAUGUGGCAACUCA | NM_001611 |
| 526 | ACP5 | GCAAGACAUCAAUGACAAG | NM_001611 |
| 527 | ACP5 | CAGCUGUCCUGGCUCAAGA | NM_001611 |
| 528 | ACP6 | GGAGAGAGACUGAGGAAGA | NM_016361 |
| 529 | ACP6 | AGUUGGAAAUGAAGAGUAA | NM_016361 |
| 530 | ACP6 | GGAAGAACUAUGUGGAAGA | NM_016361 |
| 531 | ACP6 | CCGCAGAAGACUUGUGUUU | NM_016361 |
| 532 | ACP6 | CAUUGACAGUAGUGAUAAA | NM_016361 |
| 533 | ACP6 | GGUGAUGGAAGUUGGAAAU | NM_016361 |
| 534 | ACP6 | GAUGGAAGUUGGAAAUGAA | NM_016361 |
| 535 | ACP6 | AGGCCAAACUUGAAAUACA | NM_016361 |
| 536 | ACP6 | UCAGAAAGCUGUAUCUCUA | NM_016361 |
| 537 | ACP6 | AGGAGCAGGUAGAGUGGAA | NM_016361 |
| 538 | ACP6 | GGCCAAACUUGAAAUACAA | NM_016361 |
| 539 | ACP6 | CCCAAGGAAGACAGGGAAA | NM_016361 |
| 540 | ACP6 | GAGCAGGUGCCGAGAGGUU | NM_016361 |
| 541 | ACP6 | GGCAUUGACAGUAGUGAUA | NM_016361 |
| 542 | ACP6 | GAGGAAGAACUAUGUGGAA | NM_016361 |
| 543 | ACP6 | GAGAGAGACUGAGGAAGAA | NM_016361 |
| 544 | ACP6 | GGAAAUGAAGAGUAACUGA | NM_016361 |
| 545 | ACP6 | CAGGAUGUGUUGAUUUUAA | NM_016361 |
| 546 | ACP6 | CCACAAAUGGCCACCGUUU | NM_016361 |
| 547 | ACP6 | GGAGCUUGCUUAUAGAAAA | NM_016361 |
| 548 | ACP6 | UGGGAGAGAGACUGAGGAA | NM_016361 |
| 549 | ACP6 | GGGCAUUGACAGUAGUGAU | NM_016361 |
| 550 | ACP6 | CCACACUGAUGAAGCAGAU | NM_016361 |
| 551 | ACP6 | ACAUACUGCCCAAGGAAGA | NM_016361 |
| 552 | ACP6 | UCCACAUCCUAGAGAGCAA | NM_016361 |
| 553 | ACP6 | GUACAUACUGCCCAAGGAA | NM_016361 |
| 554 | ACP6 | CCUUGUACAUACUGCCCAA | NM_016361 |
| 555 | ACP6 | CGACAAGAUCAGAAAGCUG | NM_016361 |
| 556 | ACP6 | CAGAAGUCUUGUAUCCCAA | NM_016361 |
| 557 | ACP6 | GUGAAGGACAGGAUGGGCA | NM_016361 |
| 558 | ACPP | AUGACUAAGUUGAGAGAAU | NM_001099 |
| 559 | ACPP | ACAAAGACAUCGAUUGAUA | NM_001099 |
| 560 | ACPP | GGUCAAAGUUCAUAGAGUU | NM_001099 |
| 561 | ACPP | GAAGAGAGCAACUCAGAUA | NM_001099 |
| 562 | ACPP | UCACAAGCAGAAAGAGAAA | NM_001099 |
| 563 | ACPP | GGGAGUACUUUGUGGAGAU | NM_001099 |
| 564 | ACPP | CUUUGAAAUCAGAGGAAUU | NM_001099 |
| 565 | ACPP | GGAGACAUCUGGAAAGUUU | NM_001099 |
| 566 | ACPP | UUAUGAACUUGGAGAGUAU | NM_001099 |
| 567 | ACPP | AGAUAAAGCUUAGGUCAAA | NM_001099 |
| 568 | ACPP | GCAAGAAGAAAUCAUGAUA | NM_001099 |
| 569 | ACPP | GGAGAGUAUAUAAGAAAGA | NM_001099 |
| 570 | ACPP | UCCAGAAGCUCCAGUGAUA | NM_001099 |
| 571 | ACPP | GGCCAGGCAUGGUGGUUUA | NM_001099 |
| 572 | ACPP | GAUGAUGCUUUGAGAACAU | NM_001099 |
| 573 | ACPP | GAACAUACUUUGGCCAUUA | NM_001099 |
| 574 | ACPP | UGACAAAGACAUCGAUUGA | NM_001099 |
| 575 | ACPP | CCUCAUGGCCACAAGGAUU | NM_001099 |
| 576 | ACPP | GCAGUGAGCCAAAUGUAAA | NM_001099 |
| 577 | ACPP | AGAGUGUGGUUACGAAAUA | NM_001099 |
| 578 | ACPP | UCAAGGAGAGGCAAAGAAA | NM_001099 |
| 579 | ACPP | CUAUAAACAUGAACAGGUU | NM_001099 |
| 580 | ACPP | GAAAAUGGGCUUUGGAUGA | NM_001099 |
| 581 | ACPP | CGGAAUUGUACUUUGAGAA | NM_001099 |
| 582 | ACPP | CAACACAUCAGGAAAGAGA | NM_001099 |
| 583 | ACPP | GAACAAGGAAGGAAAGAUG | NM_001099 |
| 584 | ACPP | GGAAUGAGACGCAGCACGA | NM_001099 |
| 585 | ACPP | UAUAGCAGCUCUUGAAGUA | NM_001099 |
| 586 | ACPP | AAGCAGAAAGAGAAAUCUA | NM_001099 |
| 587 | ACPP | GGUUUAUAUUCGAAGCACA | NM_001099 |
| 588 | ACPT | CGCCAAAGAUGGAGGGAAU | NM_080791 |
| 589 | ACPT | AGGAUAAGCUGCUGAGGUU | NM_033068 |
| 590 | ACPT | CCGCCAAAGAUGGAGGGAA | NM_033068 |
| 591 | ACPT | CCCUCAAGAUGGUCAUGUA | NM_033068 |
| 592 | ACPT | CCAAAGAUGGAGGGAAUGU | NM_080791 |
| 593 | ACPT | CCAGCAAGCCCACGGUCUU | NM_033068 |
| 594 | ACPT | GGAUCCUGCUGAAUGCUAU | NM_033068 |
| 595 | ACPT | AAAGAUGGAGGGAAUGUCA | NM_080791 |
| 596 | ACPT | CCAACAUGUAUGCUCAGUA | NM_033068 |
| 597 | ACPT | GCGCAGGGOAUGGAAGGUU | NM_033068 |
| 598 | ACPT | CAACAUGUAUGCUCAGUAG | NM_033068 |
| 599 | ACPT | CCAUGGACCCACACAAGGA | NM_033068 |
| 600 | ACPT | UGAGUCGCCUGGAGAACUU | NM_080789 |
| 601 | ACPT | GAUCUCGGCUUUGGAUAUU | NM_080791 |
| 602 | ACPT | UGAAUGCUAUCCUUGCAAA | NM_080791 |
| 603 | ACPT | UCAAGAUGGUCAUGUACUC | NM_080789 |
| 604 | ACPT | GCUGAAUGCUAUCCUUGCA | NM_033068 |
| 605 | ACPT | GGGAUCCUGCUGAAUGCUA | NM_033068 |
| 606 | ACPT | UUGCCCAGAUCUCGGCUUU | NM_080789 |
| 607 | ACPT | CUACGAGGCCUUCCUGAGU | NM_080789 |
| 608 | ACPT | CAAGAUGGUOAUGUACUCA | NM_080791 |
| 609 | ACPT | GAAUCCCGCCAAAGAUGGA | NM_080791 |
| 610 | ACPT | GUUCGUGGCUCUGGUAUUC | NM_080791 |
| 611 | ACPT | GGUGUUCGUGGCUCUGGUA | NM_033068 |
| 612 | ACPT | GCCCGUGGCUGAGGAUAAG | NM_080789 |
| 613 | ACPT | CCAGAUCUCGGCUUUGGAU | NM_080791 |
| 614 | ACPT | GCCCAGAUCUCGGCUUUGG | NM_080789 |
| 615 | ACYP1 | AAGCAAACUUCAACAAUGA | NM_001107 |
| 616 | ACYP1 | CCUGUAUGAUGGAAGGAUU | NM_001107 |
| 617 | ACYP1 | GCAGGAAUGGCUUGAAACA | NM_001107 |
| 618 | ACYP1 | GAGCAUGGCAGAAGGAAAC | NM_001107 |
| 619 | ACYP1 | GAUUACCACUGUACACAAA | NM_001107 |
| 620 | ACYP1 | UCAUCUUGAAGUUGGAUUA | NM_001107 |
| 621 | ACYP1 | AUGCAGGAAUGGCUUGAAA | NM_001107 |
| 622 | ACYP1 | CUAAAUCACACAUCGACAA | NM_001107 |
| 623 | ACYP1 | UGAUAUCAGUGGAUUAUGA | NM_001107 |
| 624 | ACYP1 | UAAGAUAAACUCAGUGGUU | NM_001107 |
| 625 | ACYP1 | GUAAAAUAAUGGCCUGAAU | NM_001107 |
| 626 | ACYP1 | CCACUGUACACAAAUCUAA | NM_001107 |
| 627 | ACYP1 | GAAGGAAACACCCUGAUAU | NM_001107 |
| 628 | ACYP1 | ACAAAGCAAACUUCAACAA | NM_001107 |
| 629 | ACYP1 | AGAAGGAAACACCCUGAUA | NM_001107 |
| 630 | ACYP1 | UCACACAUCGACAAAGCAA | NM_001107 |
| 631 | ACYP1 | GGAUUACCACUGUACACAA | NM_001107 |
| 632 | ACYP1 | UAAAUCACACAUCGACAAA | NM_001107 |
| 633 | ACYP1 | ACUCAGACUUCCAAAUUGU | NM_001107 |
| 634 | ACYP1 | GAACCUUCUGCUUAGAGUA | NM_001107 |
| 635 | ACYP1 | CAAAGCAAACUUCAACAAU | NM_001107 |
| 636 | ACYP1 | CGACAAAGCAAACUUCAAC | NM_001107 |
| 637 | ACYP1 | UGGAAGGAUUACCACUGUA | NM_001107 |
| 638 | ACYP1 | AAAGCAAACUUCAACAAUG | NM_001107 |
| 639 | ACYP1 | UGAAGUUGGAUUACUCAGA | NM_001107 |
| 640 | ACYP1 | GAUAUCAGUGGAUUAUGAA | NM_001107 |
| 641 | ACYP1 | UCAGACUUCCAAAUUGUAA | NM_001107 |
| 642 | ACYP1 | GGAAGGAUUACCACUGUAC | NM_001107 |
| 643 | ACYP1 | UCUCCAAGGUGCGUCAUAU | NM_001107 |
| 644 | ACYP1 | UUACUCAGACUUCCAAAUU | NM_001107 |
| 645 | ACYP2 | GAAUAAUAGUAGCAGAGUA | NM_138448 |
| 646 | ACYP2 | GCACAAACUUUUCUAAUGA | NM_138448 |
| 647 | ACYP2 | CAGCAAAGGCACCGUGACA | NM_138448 |
| 648 | ACYP2 | GAAGAUGAAGCUAGGAAAA | NM_138448 |
| 649 | ACYP2 | CAGAGUACCUUGAUCAAUU | NM_138448 |
| 650 | ACYP2 | CAGAAUGUAUACAGAAGAU | NM_138448 |
| 651 | ACYP2 | GGUGAAGAAUACCAGCAAA | NM_138448 |
| 652 | ACYP2 | AGAAGAUGAAGCUAGGAAA | NM_138448 |
| 653 | ACYP2 | GAACAGAGUACCUUGAUCA | NM_138448 |
| 654 | ACYP2 | CAGAAGAUGAAGCUAGGAA | NM_138448 |
| 655 | ACYP2 | GGCCAGAAGACAAAGUCAA | NM_138448 |
| 656 | ACYP2 | GAAUGUAUACAGAAGAUGA | NM_138448 |
| 657 | ACYP2 | CACUCAAAUCCGUGGACUA | NM_138448 |
| 658 | ACYP2 | UGUAACACACUGAACAAUA | NM_138448 |
| 659 | ACYP2 | GGGUGAAGAAUACCAGCAA | NM_138448 |
| 660 | ACYP2 | GUAGCAGAGUAGGGUGAAA | NM_138448 |
| 661 | ACYP2 | ACACACUGAACAAUAGAUA | NM_138448 |
| 662 | ACYP2 | UGGCGAGACAUCAAAUAAA | NM_138448 |
| 663 | ACYP2 | CCACAAAUAUACCCAACUU | NM_138448 |
| 664 | ACYP2 | GGUGUUUGCUUCAGAAUGU | NM_138448 |
| 665 | ACYP2 | UCGGAAGAGUGCAGGGUGU | NM_138448 |
| 666 | ACYP2 | AGAUGAAGCUAGGAAAAUA | NM_138448 |
| 667 | ACYP2 | AAUAAUAGUAGCAGAGUAG | NM_138448 |
| 668 | ACYP2 | GGGCACAGCAUCCGGCUUU | NM_138448 |
| 669 | ACYP2 | GUGAAGAAUACCAGCAAAG | NM_138448 |
| 670 | ACYP2 | GCCAGAAGACAAAGUCAAU | NM_138448 |
| 671 | ACYP2 | GCUUCAGAAUGUAUACAGA | NM_138448 |
| 672 | ACYP2 | GAGCAAGGUUGGAAGCCCU | NM_138448 |
| 673 | ACYP2 | AAGAAUACCAGCAAAGGCA | NM_138448 |
| 674 | ACYP2 | CUUCAGAAUGUAUACAGAA | NM_138448 |
| 675 | AKAP11 | GAUCAAGGUAGGAGAUAAA | NM_144490 |
| 676 | AKAP11 | GCACAAACAUGGAAAGUCA | NM_144490 |
| 677 | AKAP11 | CUAUAAAGAUUGUGCAGUA | NM_016248 |
| 678 | AKAP11 | CAGCAGAUCUUGUGGAAAA | NM_016248 |
| 679 | AKAP11 | GGUAAUAGUGAGUUGAUAA | NM_016248 |
| 680 | AKAP11 | GGAUGACACUCUAGAGCUA | NM_016248 |
| 681 | AKAP11 | GGAUUAACCUGGAAAUAUU | NM_144490 |
| 682 | AKAP11 | AGAAUUAGCCAAAGAGUUU | NM_016248 |
| 683 | AKAP11 | GGAAAGACACUGCUAAUUA | NM_016248 |
| 684 | AKAP11 | GUGGAGAAAUGCAGGAAUU | NM_016248 |
| 685 | AKAP11 | CAGCAGAAGUCAUUGGCUA | NM_016248 |
| 686 | AKAP11 | CCACCAAGAAGCAGACAAA | NM_016248 |
| 687 | AKAP11 | CAAAUCAAGCUGAGGUUAA | NM_144490 |
| 688 | AKAP11 | GAAAGAUGAUAUAGAGGAU | NM_144490 |
| 689 | AKAP11 | GGUAUUAGCAUGUGUGGUA | NM_016248 |
| 690 | AKAP11 | CAGCAAGCCUUAAUAUAAA | NM_016248 |
| 691 | AKAP11 | AAGCAAUUAUGGUGACAAA | NM_016248 |
| 692 | AKAP11 | AGAACAAACUUUAGAGACU | NM_016248 |
| 693 | AKAP11 | CUGAAGAAGUUGAGAGUAG | NM_016248 |
| 694 | AKAP11 | GCUUAAAUGUGCAAAGUCA | NM_016248 |
| 695 | AKAP11 | AGAUGUGGAUACAGAAUUA | NM_016248 |
| 696 | AKAP11 | GGAGAUAGGAUUCAUGAAA | NM_016248 |
| 697 | AKAP11 | GUAGAAGAGAAGUUGGAUA | NM_016248 |
| 698 | AKAP11 | GAAGAUAAACAGAAAGUCA | NM_016248 |
| 699 | AKAP11 | GCAAACAAAUGGUAUCUAA | NM_016248 |
| 700 | AKAP11 | CUCCAGAGAUGAAGAUUUA | NM_144490 |
| 701 | AKAP11 | UAACAAAGAUCCCGUCAUA | NM_016248 |
| 702 | AKAP11 | ACAGAAAGUCAGAGACAGA | NM_016248 |
| 703 | AKAP11 | GAUAAUGAGUGUCACGUUA | NM_016248 |
| 704 | AKAP11 | AAUUAGAGCUUCAGUGAGA | NM_016248 |
| 705 | ALPI | GGGCCAAGCAAGCAGGAAA | NM_001631 |
| 706 | ALPI | GAAUCAGGCUGGACGGGAA | NM_001631 |
| 707 | ALPI | CCUAGGAGACAAAGCAAUA | NM_001631 |
| 708 | ALPI | CAUACAAUGUGGACAGACA | NM_001631 |
| 709 | ALPI | GCGAAGACGUGGCGGUGUU | NM_001631 |
| 710 | ALPI | CCAAGAAGCUGCAGCCCAU | NM_001631 |
| 711 | ALPI | GGGCAUAGAUUUCUCAACA | NM_001631 |
| 712 | ALPI | GGAGACAAAGCAAUAAUAA | NM_001631 |
| 713 | ALPI | GUGCAGGAAUGGCUGGCAA | NM_001631 |
| 714 | ALPI | CGUCCAUCCUGUACGGCAA | NM_001631 |
| 715 | ALPI | CAAGCAAGCAGGAAAGUCA | NM_001631 |
| 716 | ALPI | CAGGAAAGUCAGUAGGAGU | NM_001631 |
| 717 | ALPI | CGACCAGACGUGAAUGAGA | NM_001631 |
| 718 | ALPI | GACAAUAAAGGGACCAAAA | NM_001631 |
| 719 | ALPI | AGGAAUGGCUGGCAAAGCA | NM_001631 |
| 720 | ALPI | CGCUUUAACCAGUGCAACA | NM_001631 |
| 721 | ALPI | AGGCCAACUUCCAGACCAU | NM_001631 |
| 722 | ALPI | GGCAUAGAUUUCUCAACAA | NM_001631 |
| 723 | ALPI | CAACACGACACGCGGCAAU | NM_001631 |
| 724 | ALPI | CAGACGUGAAUGAGAGCGA | NM_001631 |
| 725 | ALPI | GUGCCUGGUAUGUGUGGAA | NM_001631 |
| 726 | ALPI | GGACACCUGAAGAAGAGAA | NM_001631 |
| 727 | ALPI | UCCAGAAGGUCGCCAAGAA | NM_001631 |
| 728 | ALPI | GCAAGGCUCAGGACAGCAA | NM_001631 |
| 729 | ALPI | CCACUCAGCUCAUCUCCAA | NM_001631 |
| 730 | ALPI | CCGGAGACACGAAAUAUGA | NM_001631 |
| 731 | ALPI | GGAGACACGAAAUAUGAGA | NM_001631 |
| 732 | ALPI | AGGAGACAAAGCAAUAAUA | NM_001631 |
| 733 | ALPI | ACAUGGACAUUGACGUGAU | NM_001631 |
| 734 | ALPI | GAUGCCAGCCAGAAUGGAA | NM_001631 |
| 735 | ALPL | GUAUGAGAGUGACGAGAAA | NM_000478 |
| 736 | ALPL | CGCAAGAGACACUGAAAUA | NM_000478 |
| 737 | ALPL | GGCCAAGGACGCUGGGAAA | NM_000478 |
| 738 | ALPL | CCUUAGUGCCAGAGAAAGA | NM_000478 |
| 739 | ALPL | GGGCGGUGAACGAGAGAAU | NM_000478 |
| 740 | ALPL | AUGCAUAACAUCAGGGACA | NM_000478 |
| 741 | ALPL | AGACCAAGCGCAAGAGACA | NM_000478 |
| 742 | ALPL | CCUACCAGCUCAUGCAUAA | NM_000478 |
| 743 | ALPL | AGUACGAGCUGAACAGGAA | NM_000478 |
| 744 | ALPL | GCGCAGGAUUGGAACAUCA | NM_000478 |
| 745 | ALPL | AAACUGAUGUGGAGUAUGA | NM_000478 |
| 746 | ALPL | AGUACAGACUGCAGACAUU | NM_000478 |
| 747 | ALPL | UGCCAGAGAAAGAGAAAGA | NM_000478 |
| 748 | ALPL | GCGCAAGAGACACUGAAAU | NM_000478 |
| 749 | ALPL | GGAAAUACAUGUACCCCAA | NM_000478 |
| 750 | ALPL | CUCCUUAGUGCCAGAGAAA | NM_000478 |
| 751 | ALPL | GGUGGAAGGAGGCAGAAUU | NM_000478 |
| 752 | ALPL | ACAUGUACCCCAAGAAUAA | NM_000478 |
| 753 | ALPL | ACACCAACGUGGCUAAGAA | NM_000478 |
| 754 | ALPL | CUGGGAAAUCUGUGGGCAU | NM_000478 |
| 755 | ALPL | CCCACAAGCCCGUGACAGA | NM_000478 |
| 756 | ALPL | UCAUCAUGUUCCUGGGAGA | NM_000478 |
| 757 | ALPL | UCUCAAAGCCUCUUAUUUU | NM_000478 |
| 758 | ALPL | CGUGGAACAUUGUGGAUCU | NM_000478 |
| 759 | ALPL | AGGAUUGGAACAUCAGUUA | NM_000478 |
| 760 | ALPL | AGUAUGAGAGUGACGAGAA | NM_000478 |
| 761 | ALPL | AUGUGGAGUAUGAGAGUGA | NM_000478 |
| 762 | ALPL | CCAUCCAGAUCCUGCGGAA | NM_000478 |
| 763 | ALPL | GCGGUGAACGAGAGAAUGU | NM_000478 |
| 764 | ALPL | GUGACCACCACGAGAGUGA | NM_000478 |
| 765 | ALPP | CGGAAACGGUCCAGGCUAU | NM_001632 |
| 766 | ALPP | GGAAGAAUCUGGUGCAGGA | NM_001632 |
| 767 | ALPP | GGGCAUAGAUUUCUCAAGA | NM_001632 |
| 768 | ALPP | CCUGGGAGACAAAGCAAUA | NM_001632 |
| 769 | ALPP | GGGCCAAGAAAGCAGGGAA | NM_001632 |
| 770 | ALPP | CUGAGUACCCAGAUGACUA | NM_001632 |
| 771 | ALPP | CAAACUGGGGCCUGAGAUA | NM_001632 |
| 772 | ALPP | GGGAGACAAAGCAAUAAUA | NM_001632 |
| 773 | ALPP | ACAUGAAAUACGAGAUCCA | NM_001632 |
| 774 | ALPP | CAGGGAAGUCAGUGGGAGU | NM_001632 |
| 775 | ALPP | GGAGGCUGAAGCAGGAUAA | NM_001632 |
| 776 | ALPP | CAAGAAAGCAGGGAAGUCA | NM_001632 |
| 777 | ALPP | GAUGAAUCGGGCCAAGAAA | NM_001632 |
| 778 | ALPP | GGGCACUGACUGAGACGAU | NM_001632 |
| 779 | ALPP | GAUGUUACCGAGAGCGAGA | NM_001632 |
| 780 | ALPP | UAGACAAACAUGUGCCAGA | NM_001632 |
| 781 | ALPP | CGGUCCUCCUAUACGGAAA | NM_001632 |
| 782 | ALPP | AGCCUGGAGACAUGAAAUA | NM_001632 |
| 783 | ALPP | CGGAUGUUACCGAGAGCGA | NM_001632 |
| 784 | ALPP | GGACACUGGGCAUAGAUUU | NM_001632 |
| 785 | ALPP | GCACUGACUGAGACGAUCA | NM_001632 |
| 786 | ALPP | UGGAGACCAUCCUGGCUAA | NM_001632 |
| 787 | ALPP | GGCAGAAGAAGGACAAACU | NM_001632 |
| 788 | ALPP | GAAGUCAGUGGGAGUGGUA | NM_001632 |
| 789 | ALPP | GAUCUUUGCUUCAGUCCUU | NM_001632 |
| 790 | ALPP | CCUACACGGUCCUCCUAUA | NM_001632 |
| 791 | ALPP | AGACAUGAAAUACGAGAUC | NM_001632 |
| 792 | ALPPL2 | CAAGAAAGCAGGAAAGUCA | NM_031313 |
| 793 | ALPPL2 | GGGCCAAGAAAGCAGGAAA | NM_031313 |
| 794 | ALPPL2 | CCUCCAUUCUUCUGGGAAA | NM_031313 |
| 795 | ALPPL2 | UGGGAAACACAAAGCAAUA | NM_031313 |
| 796 | ALPPL2 | CAGGAAAGUCAGUGGGAGU | NM_031313 |
| 797 | ALPPL2 | GAUCCUAGGUGGAGGCCGA | NM_031313 |
| 798 | ALPPL2 | AGGAAUGGCUGGCGAAGCA | NM_031313 |
| 799 | ALPPL2 | GGUGAAUCGGGCCAAGAAA | NM_031313 |
| 800 | ALPPL2 | GGAAACACAAAGCAAUAAU | NM_031313 |
| 801 | ALPPL2 | CAGCAAGGAAGACUCAUUA | NM_031313 |
| 802 | ALPPL2 | GGGAAACACAAAGCAAUAA | NM_031313 |
| 803 | ALPPL2 | UAGACAAGCAUGUGCCAGA | NM_031313 |
| 804 | ALPPL2 | GGCAUGGAUUUCUCAGCAA | NM_031313 |
| 805 | ALPPL2 | GGUGGAGGCCGAAAGUACA | NM_031313 |
| 806 | ALPPL2 | CAGGAUAGCAGUCCAGAGU | NM_031313 |
| 807 | ALPPL2 | CCACGCAGCUCAUCUCCAA | NM_031313 |
| 808 | ALPPL2 | CCACUGGGCUAAUUCUACA | NM_031313 |
| 809 | ALPPL2 | AGAAUCUGGUGCAGGAAUG | NM_031313 |
| 810 | ANP32E | UCACAAACCUGGAAGAUUA | NM_030920 |
| 811 | ANP32E | CUGGAAGAUUAUAGAGAAA | NM_030920 |
| 812 | ANP32E | GGAUGAAGAUGAAGAUGAA | NM_030920 |
| 813 | ANP32E | GGGAAGAAGAGGAAGAAGA | NM_030920 |
| 814 | ANP32E | CAGAAGAAAUUCAGGAUGA | NM_030920 |
| 815 | ANP32E | CGGAAGGAUAUGAGGAAGA | NM_030920 |
| 816 | ANP32E | AUGAAGAGGAAGAGGAAAA | NM_030920 |
| 817 | ANP32E | GGGAGAGGGAGAAGAGGAA | NM_030920 |
| 818 | ANP32E | GGAUGAGGAUGAAGAUGAA | NM_030920 |
| 819 | ANP32E | UCACAUACUUAGAUGGAUU | NM_030920 |
| 820 | ANP32E | UGAAGAUGAUGAAGAGGAA | NM_030920 |
| 821 | ANP32E | CAAUCUGAGUGGAAACAAA | NM_030920 |
| 822 | ANP32E | AGGAAGAGGAAGAGGAGGA | NM_030920 |
| 823 | ANP32E | GGAAGAUUAUAGAGAAAGU | NM_030920 |
| 824 | ANP32E | AGGAGGAGGAAGAGGAAGA | NM_030920 |
| 825 | ANP32E | GAGAGGAAGAAGAUGACUA | NM_030920 |
| 826 | BPNT1 | GGUUGUAAGAAGUGGGAUA | NM_006085 |
| 827 | BPNT1 | CAAUUGAGUUGGAGACUUA | NM_006085 |
| 828 | BPNT1 | CAACAGACCUGCAGACCAA | NM_006085 |
| 829 | BPNT1 | GGGAAGAAAUACUGAAGCA | NM_006085 |
| 830 | BPNT1 | GUACAGUGCUAUUAAAGAA | NM_006085 |
| 831 | BPNT1 | GGAGAAGACCUGUGCAACA | NM_006085 |
| 832 | BPNT1 | AGUAGGAGGAGCAGGAAAU | NM_006085 |
| 833 | BPNT1 | GGAUCUGCCUUCUGAGGAA | NM_006085 |
| 834 | BPNT1 | GAGUAGGAGGAGCAGGAAA | NM_006085 |
| 835 | BPNT1 | UGGAUGGAACCAAGGAAUA | NM_006085 |
| 836 | BPNT1 | GGAAUAUACCGAAGGUCUU | NM_006085 |
| 837 | BPNT1 | GGAGGCAAGUUAACCGAUA | NM_006085 |
| 838 | BPNT1 | GGGAAACACAUUAUCACAA | NM_006085 |
| 839 | BPNT1 | UGGAAUUGCUUAUGAAGGA | NM_006085 |
| 840 | BPNT1 | AGACCAAAGCUGACCGAUU | NM_006085 |
| 841 | BPNT1 | GGAGCAGGAAAUAAGAUUA | NM_006085 |
| 842 | BPNT1 | ACAAGGAUGUGAAGCAUAU | NM_006085 |
| 843 | BPNT1 | CUGAAGGAGACCUGGGUAU | NM_006085 |
| 844 | BPNT1 | GUGGAGAAGACCUGUGCAA | NM_006085 |
| 845 | BPNT1 | AAUUAGAGUUCCACCUUUA | NM_006085 |
| 846 | BPNT1 | GCGAGUAGGAGGAGCAGGA | NM_006085 |
| 847 | BPNT1 | UCAAAAGGCAGGAAUGAUA | NM_006085 |
| 848 | BPNT1 | AGACUUGGUUCUCAAAUAA | NM_006085 |
| 849 | BPNT1 | AAGACUUGGUUCUCAAAUA | NM_006085 |
| 850 | BPNT1 | AGCCAUAGCAGGAGUUAUU | NM_006085 |
| 851 | BPNT1 | CUGAGGAAGUGGAUCAAGA | NM_006085 |
| 852 | BPNT1 | CAGUCAGUGGGAAGAAAUA | NM_006085 |
| 853 | BPNT1 | GGAAGAAAUACUGAAGCAA | NM_006085 |
| 854 | BPNT1 | ACUCACAAUUAUAGGGGAA | NM_006085 |
| 855 | BPNT1 | UUGAGAGGCUGAAGCAGAA | NM_006085 |
| 856 | C14orf24 | GGAAGAAGAAGAAGAAGAA | NM_173607 |
| 857 | C14ORF24 | GGAUGAAGAAGGAGGAAGA | NM_173607 |
| 858 | C14ORF24 | GUGAAACAAUGGAAGAAUA | NM_173607 |
| 859 | C14orf24 | GGUUAUCGGUUCAGCGUUA | NM_173607 |
| 860 | C14orf24 | GGGCAGAUGAGUAACGAAA | NM_173607 |
| 861 | C14ORF24 | AGAAGAAGAAGAAGAAGAA | NM_173607 |
| 862 | C14orf24 | UGUAUAAGGUGCAAUGAUA | NM_173607 |
| 863 | C14ORF24 | GGAGGAAGAAGAAGAAGAA | NM_173607 |
| 864 | C14orf24 | CAUAGUAAGUGAUGGUAAU | NM_173607 |
| 865 | C14ORF24 | GAAGAAAGUCCCAAGGAGA | NM_173607 |
| 866 | C14ORF24 | AGGAAGAAGAAGAAGAAGA | NM_173607 |
| 867 | C14orf24 | AGAAUAAAUUGCAGACUGA | NM_173607 |
| 868 | C14orf24 | GAAUGGUGGUUCAUAGUAA | NM_173607 |
| 869 | C14orf24 | UGGGACAGGUAUAGAUUUA | NM_173607 |
| 870 | C14orf24 | GGAGGGAGACAGUGAAGUA | NM_173607 |
| 871 | C14orf24 | GCAGAUGAGUAACGAAAGA | NM_173607 |
| 872 | C14ORF24 | UGAAGAAGGAGGAAGAAGA | NM_173607 |
| 873 | C14ORF24 | AAGAAGAAGAAGAAGAAGA | NM_173607 |
| 874 | C14orf24 | GAAGAAGGAGGAAGAAGAA | NM_173607 |
| 875 | C14orf24 | CAAUAUAGUGGGUCUGUAA | NM_173607 |
| 876 | C14orf24 | AAGAAUGUGUGGAGUGUUU | NM_173607 |
| 877 | C14orf24 | CAUCAGGAGCAAUUAGAUA | NM_173607 |
| 878 | C14orf24 | AAGGUAAGUUGCUGAUUAA | NM_173607 |
| 879 | C14orf24 | CCUAGAGCCUUAAUAGUUA | NM_173607 |
| 880 | C14orf24 | AACUACAGGUUGAAGGAUA | NM_173607 |
| 881 | C14orf24 | CAUUAGGAGUGUUCAGCUA | NM_173607 |
| 882 | C14ORF24 | GAAUAUUAUCGGAUGAAGA | NM_173607 |
| 883 | C14orf24 | GGGAGACAGUGAAGUAAUU | NM_173607 |
| 884 | C14ORF24 | AGAAGGAGGAAGAAGAAGA | NM_173607 |
| 885 | C14ORF24 | CGGUGUGGAACGAGGAGAA | NM_173607 |
| 886 | C7ORF16 | AAACCAAGGAGGAAAGAUA | NM_006658 |
| 887 | C7ORF16 | GAUGAGAGACCCAAAGCAA | NM_006658 |
| 888 | C7ORF16 | GUGACAAGAUAGCUAUUUA | NM_006658 |
| 889 | C7ORF16 | CAGAAGACAGACUGGACAA | NM_006658 |
| 890 | C7ORF16 | AUACGAUGUUCAAGAGAGA | NM_006658 |
| 891 | C7ORF16 | AGAGACAUCCAAAGGGCAA | NM_006658 |
| 892 | C7ORF16 | UUUCAUACCAGGUGUGUUU | NM_006658 |
| 893 | C7ORF16 | CGAAAAGGAUGGUGACAAG | NM_006658 |
| 894 | C7ORF16 | UGACAUUGCUCAGGGAUGA | NM_006658 |
| 895 | C7ORF16 | AAAGAAGCCUAGAAAGGGA | NM_006658 |
| 896 | C7ORF16 | GAAUGUUGAGUCAGACCAA | NM_006658 |
| 897 | C7ORF16 | ACCCAAAGCAAUCGUGGAA | NM_006658 |
| 898 | C7ORF16 | UUUCAGACCAGUUCAUUAA | NM_006658 |
| 899 | C7ORF16 | ACGAUGUUCAAGAGAGACA | NM_006658 |
| 900 | CAMK2G | AGGCAAAGCUACAGGUUUA | NM_172169 |
| 901 | CAMK2G | GGAAAGAUCCCUAUGGAAA | NM_172169 |
| 902 | CAMK2G | CCAUGAAGCCGAUGAGAAA | NM_172172 |
| 903 | CAMK2G | AAACAACGCUGCAGAUUUA | NM_001222 |
| 904 | CAMK2G | GAGAAUUGGUGCUGCAGAA | NM_172171 |
| 905 | CAMK2G | CCAAAAGCCUAUUGAACAA | NM_172169 |
| 906 | CAMK2G | GCAUGACAACAUAGAAAUA | NM_172170 |
| 907 | CAMK2G | GAGAAGAGGCAAAGCUACA | NM_001222 |
| 908 | CAMK2G | GGGAUGAGGAUCAGCACAA | NM_172172 |
| 909 | CAMK2G | GACAAAUGGUCUUAGAAUU | NM_001222 |
| 910 | CAMK2G | GGGAGAAGAGGCAAAGCUA | NM_172171 |
| 911 | CAMK2G | CCUGUUUGUUUGAGGUUUA | NM_172170 |
| 912 | CAMK2G | GAAGAGAUCUAUACCCUAA | NM_001222 |
| 913 | CAMK2G | GGAAUGAACUUCUUUGGAA | NM_001222 |
| 914 | CAMK2G | CAGGAGAUCAUUAAGAUUA | NM_172169 |
| 915 | CAMK2G | CCAGAAUGGGACACGGUAA | NM_172169 |
| 916 | CAMK2G | GAUGAGAAACCUCGUGUUA | NM_172171 |
| 917 | CAMK2G | GCAGAUAGCAAAGAAGAUA | NM_172169 |
| 918 | CAMK2G | GCACAAACAUCUCCACUUU | NM_172169 |
| 919 | CAMK2G | GAAAGAUCCCUAUGGAAAA | NM_001222 |
| 920 | CAMK2G | ACAAGAAACGGAAGGCAUU | NM_172169 |
| 921 | CAMK2G | GGAUGGCGGUGUCAAGAAA | NM_172169 |
| 922 | CAMK2G | CCAGAGAGUACUACAGUGA | NM_172169 |
| 923 | CAMK2G | CCGUCAAGCUGGCUGAUUU | NM_172169 |
| 924 | CAMK2G | AAUGAAACCUUGAACUGAA | NM_172172 |
| 925 | CAMK2G | CCGCAGGUGUGUGAAGAAA | NM_001222 |
| 926 | CAMK2G | ACAAAUGGUCUUAGAAUUC | NM_172170 |
| 927 | CAMK2G | GCUAAUGUCAGCAUCUAUA | NM_172169 |
| 928 | CAMK2G | UGAGAAACCUCGUGUUAGU | NM_001222 |
| 929 | CAMK2G | UUACAGAACAGCUGAUUGA | NM_172170 |
| 930 | CDC14A | UGGCAAUGGUGUACAGAUA | NM_033313 |
| 931 | CDC14A | GGAACGAUUUGGAGAGGUA | NM_033313 |
| 932 | CDC14A | GUAAGAAGCUUUUCCAUAA | NM_033312 |
| 933 | CDC14A | GGAACGAUUUGGAGAGGAU | NM_033312 |
| 934 | CDC14A | GGACAUUGAUAGCCUGUUA | NM_003672 |
| 935 | CDC14A | AGACAAACUACGUGCCUUA | NM_033312 |
| 936 | CDC14A | CAGAUGAUCCAGAGAACAA | NM_033312 |
| 937 | CDC14A | GAAAUUACCCUGAGCUCAA | NM_003672 |
| 938 | CDC14A | GUUUACACAUGCUGAAAUA | NM_033313 |
| 939 | CDC14A | CAUUUGAUGUGGAUGAAUA | NM_003672 |
| 940 | CDC14A | ACCAAGAAGUGGAUGUAUA | NM_003672 |
| 941 | CDC14A | AAAGAAGACACCAGAAGAA | NM_033312 |
| 942 | CDC14A | GAAACUAUGUUAUGGAGAU | NM_003672 |
| 943 | CDC14A | GCUGCAAACUAAACAAGAA | NM_033313 |
| 944 | CDC14A | GGGAUUACAACAUGGAUUU | NM_003672 |
| 945 | CDC14A | GAAGUAAGGGAGAAAGUUU | NM_003672 |
| 946 | CDC14A | AAGAAGCAGAGGAAAGAAA | NM_033313 |
| 947 | CDC14A | AGGAUAACUUAGAAGAUGA | NM_033312 |
| 948 | CDC14A | GGAAUCAUGUUGACAGUUU | NM_003672 |
| 949 | CDC14A | ACUUUAAGGAAUAGACCAA | NM_033312 |
| 950 | CDC14A | GCAAUGGUGUACAGAUAUU | NM_033312 |
| 951 | CDC14A | CUGCAAACUAAACAAGAAA | NM_033312 |
| 952 | CDC14A | AGAAGAUGAUGAUGUGGAA | NM_003672 |
| 953 | CDC14A | CAGAAAGGGAUUACAACAU | NM_033313 |
| 954 | CDC14A | CCAAGAAGUGGAUGUAUAU | NM_003672 |
| 955 | CDC14A | GCAAAAUUGAGAAUGGUUA | NM_033312 |
| 956 | CDC14A | GCAUUUAGGUCAGAUGAUA | NM_033312 |
| 957 | CDC14A | UCAUACAGUUUGUCAAGAA | NM_003672 |
| 958 | CDC14A | GCAAGAAGCAGAGGAAAGA | NM_033313 |
| 959 | CDC14A | GCUAAGUAGUUCUCUGUAU | NM_003672 |
| 960 | CDC14B | UGGCAAUGGUUUACAGAUA | NM_003671 |
| 961 | CDC14B | CAGAAAGGGUGCAAACAAA | NM_033332 |
| 962 | CDC14B | GAGAAGAAGCAUAUAGAAU | NM_003671 |
| 963 | CDC14B | CAGCAUAGAUAAUGAACUU | NM_003671 |
| 964 | CDC14B | GACCAGAGCUGAAGGAAGA | NM_033331 |
| 965 | CDC14B | CGAAAUCAAUGGAGUGACA | NM_033331 |
| 966 | CDC14B | GGAGAGAAGAUAACAUUUA | NM_033332 |
| 967 | CDC14B | GGAUAAUACCAGACCGAUU | NM_003671 |
| 968 | CDC14B | UCACAAAACUGGAAGAAAU | NM_033331 |
| 969 | CDC14B | GAACAUUCCUUUUGCUAUU | NM_033331 |
| 970 | CDC14B | GUACAGUGAUGAUGACGAA | NM_033331 |
| 971 | CDC14B | GAAUUGAUGUGCUGCUAAA | NM_003671 |
| 972 | CDC14B | GGAAAUGAAUAGGCACAAA | NM_033331 |
| 973 | CDC14B | CCAGAAAGGGUGCAAACAA | NM_033332 |
| 974 | CDC14B | GCUACAUCAUGAAGCAUUA | NM_003671 |
| 975 | CDC14B | GAAUUGAUGUGCUGCCAAA | NM_033331 |
| 976 | CDC14B | GCAGACUACUCUUCAAUAA | NM_033331 |
| 977 | CDC14B | GUAAACAGUAAGUGCAAUU | NM_033332 |
| 978 | CDC14B | CUAAAACAGUCUUGCGUUA | NM_033331 |
| 979 | CDC14B | ACACAGAAACCACGAGGUA | NM_033332 |
| 980 | CDC14B | CCAUUUGAUUGGCAGGUUA | NM_033332 |
| 981 | CDC14B | GCAUGGACUUGCUGAUCAA | NM_033332 |
| 982 | CDC14B | AAGCAAACAUAGCCCAUUA | NM_033332 |
| 983 | CDC14B | CAGAUCUGCUUCAAGGAAA | NM_033331 |
| 984 | CDC14B | CCCAAAUAAUGUCGGCUUA | NM_003671 |
| 985 | CDC14B | UAAAGAAGGCAAUGCAGUA | NM_003671 |
| 986 | CDC14B | CAUAAGAAGUGGGUGGUUU | NM_033331 |
| 987 | CDC14B | GAGCAUAUGAACUGUGUGA | NM_033332 |
| 988 | CDC14B | CAAAAGCAAUAAAGAGGAA | NM_033332 |
| 989 | CDC14B | AAACCUUAGUACUCAGAUA | NM_033332 |
| 990 | CDC25A | GAGAAGAGCAAGAGGGAGA | NM_001789 |
| 991 | CDC25A | GGGCAGUGAUUAUGAGCAA | NM_001789 |
| 992 | CDC25A | GAGAGAAUCUGAAGAAUGA | NM_001789 |
| 993 | CDC25A | UCAUACAGUUGCUGGGAAA | NM_001789 |
| 994 | CDC25A | GCAGAGAAACUUAAGCAAA | NM_001789 |
| 995 | CDC25A | AAGAAGAGGUUGAAGACUU | NM_001789 |
| 996 | CDC25A | AGUACAAAGAGGAGGAAGA | NM_001789 |
| 997 | CDC25A | AAAUGAAGCCUUUGAGUUU | NM_001789 |
| 998 | CDC25A | CCAGAUGAGAACAAGGAAA | NM_001789 |
| 999 | CDC25A | AAGAAGACCUGAAGAAGUU | NM_001789 |
| 1000 | CDC25A | UUAAAGAAGACCUGAAGAA | NM_001789 |
| 1001 | CDC25A | ACAGUAAUCUGCAGAGAAU | NM_001789 |
| 1002 | CDC25A | AGAGAAGUUUACACAGAAA | NM_001789 |
| 1003 | CDC25A | GCACAUGGAAGAAGAGGUU | NM_001789 |
| 1004 | CDC25A | CCAUUGGACAGUAAAGAAA | NM_001789 |
| 1005 | CDC25A | AGGUGAAGAACAACAGUAA | NM_201567 |
| 1006 | CDC25A | CAGAUGAGAACAAGGAAAA | NM_201567 |
| 1007 | CDC2SA | GAGUUUAAGAAGCCAGUAA | NM_001789 |
| 1008 | CDC25A | GUAGAGAAGUUUACACAGA | NM_001789 |
| 1009 | CDC25A | UGAAAGAGAUAGCAGUGAA | NM_001789 |
| 1010 | CDC25A | AGAGAGAUCGCCUGGGUAA | NM_001789 |
| 1011 | CDC25A | GGAAACAUCAGGAUUUAAA | NM_001789 |
| 1012 | CDC25A | GGAAGUACAAAGAGGAGGA | NM_001789 |
| 1013 | CDC25A | CACUGGAGGUGAAGAACAA | NM_001789 |
| 1014 | CDC25A | GGGCAGGGGAGAAGAGCAA | NM_001789 |
| 1015 | CDC25A | UGGAAGAAGAGGUUGAAGA | NM_001789 |
| 1016 | CDC25A | UUGAGAACAUUUUGGACAA | NM_201567 |
| 1017 | CDC25A | CAGAGAAACUUAAGCAAAG | NM_001789 |
| 1018 | CDC25A | CCUCAGAAGCUGUUGGGAU | NM_001789 |
| 1019 | CDC2SA | GGUAUGUGAGAGAGAGAGA | NM_001789 |
| 1020 | CDC25B | UGGAAAAGGAAGAGGAAAA | NM_021872 |
| 1021 | CDC25B | GGGAAGACAAGGAGAAUGA | NM_004358 |
| 1022 | CDC25B | UCAAUAAAGCACUGAGCAA | NM_021872 |
| 1023 | CDC258 | UCAGCAACAUCGUGGAUAA | NM_004358 |
| 1024 | CDC25B | GGGAAGACAAGGAGAAUGU | NM_021874 |
| 1025 | CDC25B | UGAGGAAGAUGAUGGAUUU | NM_021872 |
| 1026 | CDC2SB | GCACUGAGCAAGUUGAGAA | NM_021872 |
| 1027 | CDC25B | GCAGAUACCCCUAUGAAUA | NM_021872 |
| 1028 | CDC25B | GGAAGAUGGAAGUGGAGGA | NM_021873 |
| 1029 | CDC25B | CAGAAAGGGAUGUUAUUAU | NM_004358 |
| 1030 | CDC25B | CAUCCUAGAGAGUGACUUA | NM_004358 |
| 1031 | CDC25B | UGGACAUCCUAGAGAGUGA | NM_004358 |
| 1032 | CDC25B | GCUCCCAGGGCAAGGGUUA | NM_004358 |
| 1033 | CDC25B | ACAAGGAGAAUGAUGGAUU | NM_021873 |
| 1034 | CDC25B | AGGAUGAGCUAAAGACCUU | NM_021872 |
| 1035 | CDC25B | UGGAUAAGUUUGUGAUUGU | NM_004358 |
| 1036 | CDC25B | CAAGGAGAAUGAUGGAUUU | NM_004358 |
| 1037 | CDC25B | CUGAGGAAGAUGAUGGAUU | NM_004358 |
| 1038 | CDC25B | GGUCAGAGCUAAACUCCUU | NM_004358 |
| 1039 | CDC25B | GCAACAUCGUGGAUAAGUU | NM_004358 |
| 1040 | CDC25B | CCAUGAACCACGAGGCCUU | NM_021873 |
| 1041 | CDC25B | AGAGUGACUUAAAGGAUGA | NM_021872 |
| 1042 | CDC25B | CUUAAAGGAUGAUGAUGCA | NM_021873 |
| 1043 | CDC25B | ACAUCAAGACUGCGGUGAA | NM_004358 |
| 1044 | CDC25B | UCUACUACCCUGAGAUGUA | NM_021872 |
| 1045 | CDC25B | AGGAGAUUACUCUMGGCCU | NM_021872 |
| 1046 | CDC25B | AGAUGGAAGUGGAGGAGCU | NM_004358 |
| 1047 | CDC25B | AGCCCAGUCUGUUGAGUUA | NM_004358 |
| 1048 | CDC25B | AAGUACAUCUCACCAGAAA | NM_004358 |
| 1049 | CDC25B | CAGCUUAAAGGCAGUAUUU | NM_004358 |
| 1050 | CDC25C | GCAGAAACCCUGAGCAGAA | NM_001790 |
| 1051 | CDC25C | CAACACAAUACCAGAUAAA | NM_001790 |
| 1052 | CDC25C | GGGCAAAUUUCUUGGUGAU | NM_001790 |
| 1053 | CDC25C | CCACAGAGCUACUGCCCUA | NM_001790 |
| 1054 | CDC25C | UGAAAGAUCAAGAAGCAAA | NM_001790 |
| 1055 | CDC25C | AGGAAGGGCUUAUGUUUAA | NM_001790 |
| 1056 | CDC25C | CCUGAAAGAUCAAGAAGCA | NM_001790 |
| 1057 | CDC25C | GCUCAGAGGCCGUAACUUU | NM_001790 |
| 1058 | CDC25C | AGGAAGAACUGUUUAACUU | NM_001790 |
| 1059 | CDC25C | GAAACUUGGUGGACAGUGA | NM_022809 |
| 1060 | CDC25C | CAGAAGAGAUUUCAGAUGA | NM_001790 |
| 1061 | CDC25C | GAAGCAAAGGUGAGCAGAA | NM_001790 |
| 1062 | CDC25C | GAGCAGAAGUGGCCUAUAU | NM_001790 |
| 1063 | CDC25C | CGUCGAUGCCAGAGAACUU | NM_022809 |
| 1064 | CDC25C | AGACCAGGCAGAAGAGAUU | NM_001790 |
| 1065 | CDC25C | CAGGAAGGGCUUAUGUUUA | NM_022809 |
| 1066 | CDC25C | CAGAUGAAUUAAUGGAGUU | NM_001790 |
| 1067 | CDC25C | UGUACUACCCAGAGCUAUA | NM_022809 |
| 1068 | CDC25C | GACUGAAGCAGGUGGAAAA | NM_001790 |
| 1069 | CDC25C | GAGAAGACCAGGCAGAAGA | NM_022809 |
| 1070 | CDC25C | CCAGGGAGCCUUAAACUUA | NM_001790 |
| 1071 | CDC25C | CUCAGAUGCUGGAGGAAGA | NM_022809 |
| 1072 | CDC25C | GGUGGACAGUGAAAUGAAA | NM_001790 |
| 1073 | CDC25C | UGGACAGUGAAAUGAAAUA | NM_022809 |
| 1074 | CDC25C | GAUCAAGAAGCAAAGGUGA | NM_001790 |
| 1075 | CDC25C | ACACAAUACCAGAUAAAGU | NM_001790 |
| 1076 | CDC25C | CUAGAACUCCAGUGGGCAA | NM_001790 |
| 1077 | CDC25C | GGGCUUAUGUUUAAAGAAG | NM_022809 |
| 1078 | CDC25C | AGGUCUAAUCAAAGGAAAA | NM_001790 |
| 1079 | CDC25C | GCAUUUAGCUGGGAUGAAU | NM_001790 |
| 1080 | CDKN3 | ACUAAAGAGCUGUGGUAUA | NM_005192 |
| 1081 | CDKN3 | CCAUCAAGCAAUACAAUUA | NM_005192 |
| 1082 | CDKN3 | UGUCAGUUCUCUAGCAUAA | NM_005192 |
| 1083 | CDKN3 | GAACUAAAGAGCUGUGGUA | NM_005192 |
| 1084 | CDKN3 | CAAAUUAGCUGCACAUCUA | NM_005192 |
| 1085 | CDKN3 | UGAAAUAAUGGAAGAGCUU | NM_005192 |
| 1086 | CDKN3 | GCAGAUAUUCCUAAAGUUU | NM_005192 |
| 1087 | CDKN3 | CACAAUAUCACCAGAGCAA | NM_005192 |
| 1088 | CDKN3 | CUUCAUGAGUUUCGGGACA | NM_005192 |
| 1089 | CDKN3 | GGACAAAUUAGCUGCACAU | NM_005192 |
| 1090 | CDKN3 | AAUGAAACCACCAGUGUUA | NM_005192 |
| 1091 | CDKN3 | CAGAAGAACUAAAGAGCUG | NM_005192 |
| 1092 | CDKN3 | GCUGUGAAAUAAUGGAAGA | NM_005192 |
| 1093 | CDKN3 | GAACAGACUCCAAUUCAUA | NM_005192 |
| 1094 | CDKN3 | CUAUGGAGGACUUGGGAGA | NM_005192 |
| 1095 | CDKN3 | CUUCCAGGUUGUAAAUUUA | NM_005192 |
| 1096 | CDKN3 | GGGACAAAUUAGCUGCACA | NM_005192 |
| 1097 | CDKN3 | UGAAGAGCCUAUUGAAGAU | NM_005192 |
| 1098 | CDKN3 | AUGAAGAGCCUAUUGAAGA | NM_005192 |
| 1099 | CDKN3 | GGGCAAUACAGACCAUCAA | NM_005192 |
| 1100 | CDKN3 | CCAUAGACAGCCUGCGAGA | NM_005192 |
| 1101 | CDKN3 | CCGCCCAGUUCAAUACAAA | NM_005192 |
| 1102 | CDKN3 | GAGCUUACAACCUGCCUUA | NM_005192 |
| 1103 | CDKN3 | GUGAAAUAAUGGAAGAGCU | NM_005192 |
| 1104 | CDKN3 | UGUUAGAAGAAAUGUCCAA | NM_005192 |
| 1105 | CDKN3 | CUACCAGCAAUGUGGAAUU | NM_005192 |
| 1106 | CDKN3 | CUGCGAGACCUAAGAGGAU | NM_005192 |
| 1107 | CDKN3 | CUGUGGUAUACAAGACAUA | NM_005192 |
| 1108 | CDKN3 | GCUUACAACCUGCCUUAAA | NM_005192 |
| 1109 | CDKN3 | AUACAGACCAUCAAGCAAU | NM_005192 |
| 1110 | CILP | GCACAUAUCCACAGUGAAA | NM_003613 |
| 1111 | CILP | ACAUAUAAAUGGUGGUGAA | NM_003613 |
| 1112 | CILP | GGCCAAAGCCGAUGGAAUU | NM_003613 |
| 1113 | CILP | CCAGAAUCAUGAAGAGCAA | NM_003613 |
| 1114 | CILP | GUGCAGGGCAGCAGGAUAA | NM_003613 |
| 1115 | CILP | UCUACAAGCAUGAGAGCAA | NM_003613 |
| 1116 | CILP | UGAUGAACCCUGAGACAAA | NM_003613 |
| 1117 | CILP | GAAAUUGGCCACUGGUAAA | NM_003613 |
| 1118 | CILP | GAACCUUCCUGGUGGGCAA | NM_003613 |
| 1119 | CILP | CAAGAUGCUUCGUCGGAAA | NM_003613 |
| 1120 | CILP | GAACAAAAGAGAAGACAGA | NM_003613 |
| 1121 | CILP | GGAGGAAGGUGAUUUCAAA | NM_003613 |
| 1122 | CILP | AAUCAAAGGAGGAACAAAA | NM_003613 |
| 1123 | CILP | AGAAAUUGGCCACUGGUAA | NM_003613 |
| 1124 | CILP | UGGCCAAAGCCGAUGGAAU | NM_003613 |
| 1125 | CILP | GAGCUGGACUGAAGACUAU | NM_003613 |
| 1126 | CILP | GUGAUAAUCUGAUGCUGAA | NM_003613 |
| 1127 | CILP | GCAAGCUGGUGCUGAGGAA | NM_003613 |
| 1128 | CILP | GGUGAUGAACCCUGAGACA | NM_003613 |
| 1129 | CILP | GGCCAGAACUGCUCUAAUU | NM_003613 |
| 1130 | CILP | CUAUCUACCUCCUGACCAA | NM_003613 |
| 1131 | CILP | CAAACUGUCACUUGGUUAA | NM_003613 |
| 1132 | CILP | GGGAAGUGGUUGGUGAAGA | NM_003613 |
| 1133 | CILP | UGGAAGCCAUGGAGACCAA | NM_003613 |
| 1134 | CILP | CAUGAGGAUCCACGGGUUA | NM_003613 |
| 1135 | CILP | GCAAAAGCAUCCUGAAGAU | NM_003613 |
| 1136 | CILP | GUGAGGAGCACUCGGGACA | NM_003613 |
| 1137 | CILP | GAGCACAUAUCCACAGUGA | NM_003613 |
| 1138 | CILP | CUGAAGAUCACAAAGGUCA | NM_003613 |
| 1139 | CILP | UGGACAGGCUGCAGAAGUU | NM_003613 |
| 1140 | CTDP1 | GGGACAAGGUGGAGGAGCA | NM_048368 |
| 1141 | CTDP1 | ACAAAGAGGUGGACGACAU | NM_004715 |
| 1142 | CTDP1 | CGACAAACUUCCCGAUAGA | NM_004715 |
| 1143 | CTDP1 | CAGACGAGAAAGAAAGUAA | NM_004715 |
| 1144 | CTDP1 | CGAGAAAGAAAGUAAAUCA | NM_048368 |
| 1145 | CTDP1 | CAUAAUUUUCAGUGGGCUA | NM_004715 |
| 1146 | CTDP1 | UCACCCAGUUGCAGAGUAA | NM_004715 |
| 1147 | CTDP1 | GUAAGUGACAGGUGUUAAA | NM_004715 |
| 1148 | CTDP1 | GCAUGGAGGAGGAGGAGGA | NM_004715 |
| 1149 | CTDP1 | CCAGAGGCCACAAGAGGAA | NM_004715 |
| 1150 | CTDP1 | GGACGACAUCCUUGGAGAA | NM_048368 |
| 1151 | CTDP1 | GGAUGAAUGUAUUGACCCA | NM_048368 |
| 1152 | CTDP1 | UCUGAUAACUGUGAAGAAA | NM_004715 |
| 1153 | CTDP1 | GCAUUAUUGAUGAUCGAAA | NM_048368 |
| 1154 | CTDP1 | AGAGGAAGCUGAAUGAAGA | NM_004715 |
| 1155 | CTDP1 | AGAAGACGCGGGAGCAUUA | NM_004715 |
| 1156 | CTDP1 | CCAAAGGACAUGUAUAUUU | NM_004715 |
| 1157 | CTDP1 | AGACGAGAAAGAAAGUAAA | NM_048368 |
| 1158 | CTDP1 | CCAAACAGAUUUCUCUUUA | NM_048368 |
| 1159 | CTDP1 | AGGAGGAGGAGGAGGAGGA | NM_048368 |
| 1160 | CTDP1 | GAGAAGACCAGCAGCGACU | NM_004715 |
| 1161 | CTDP1 | ACACCAAGGCACAGAGGGA | NM_004715 |
| 1162 | CTDP1 | GGGCACGGGUGAUAUGAAU | NM_004715 |
| 1163 | CTDP1 | CUGAGGAGCAGGAGGAGGA | NM_048368 |
| 1164 | CTDP1 | GAGCGGUUCUGGUGAGGUU | NM_004715 |
| 1165 | CTDP1 | CCGAAUAUUAUCAAGGGAU | NM_004715 |
| 1166 | CTDP1 | UGACCUGGACUUUGACUUA | NM_048368 |
| 1167 | CTDP1 | UGGAGGAGGAGGAGGAGGA | NM_004715 |
| 1168 | CTDP1 | CGAAUAUUAUCAAGGGAUG | NM_004715 |
| 1169 | CTDP1 | CUGAUAACUGUGAAGAAAU | NM_004715 |
| 1170 | CTDSP1 | GGGCAAAGGUGACCAGAAG | NM_182642 |
| 1171 | CTDSP1 | GGAACUACGUGAAGGACCU | NM_182642 |
| 1172 | CTDSP1 | GGUUUGACAACAUGAGUGA | NM_182642 |
| 1173 | CTDSP1 | ACACAGAGCUCCACGACCU | NM_021198 |
| 1174 | CTOSP1 | AUGAGUUCCUGCAGCGAAU | NM_021198 |
| 1175 | CTDSP1 | UGACAACAUGAGUGACACA | NM_021198 |
| 1176 | CTDSP1 | CAUCAUCCCUGUGGAGAUU | NM_182642 |
| 1177 | CTDSP1 | GGGUGCUCAUCCUGGACAA | NM_021198 |
| 1178 | CTDSP1 | GGGCGAGCUCUUUGAAUGU | NM_021198 |
| 1179 | CTDSP1 | CUGCUAGCCUCGCCAAGUA | NM_182642 |
| 1180 | CTDSP1 | GCAAAGGUGACCAGAAGUC | NM_021198 |
| 1181 | CTDSP1 | GACCAGAAGUCAGCAGCUU | NM_021198 |
| 1182 | CTDSP2 | CGUAUAAGGAGGAAGCAAA | NM_005730 |
| 1183 | CTDSP2 | GGGAGGGACCUGAGAAAGA | NM_005730 |
| 1184 | CTDSP2 | CGAUGAAACCCUUGUGCAU | NM_005730 |
| 1185 | CTDSP2 | CAACAAUGCUGACUUCAUA | NM_005730 |
| 1186 | CTDSP2 | CAGAGGUGACAGAGGAAGA | NM_005730 |
| 1187 | CTDSP2 | CCUUUAAGCCAAUCAACAA | NM_005730 |
| 1188 | CTDSP2 | GCGUAUAAGGAGGAAGCAA | NM_005730 |
| 1189 | CTDSP2 | GGUGACAGAGGAAGAUCAA | NM_005730 |
| 1190 | CTDSP2 | CCACUGAGCUCGCUGCGUA | NM_005730 |
| 1191 | DAPP1 | GGAAAUUGGUCAAGGACAA | NM_014395 |
| 1192 | DAPP1 | CCAAAUGGACUGAAAGAAA | NM_014395 |
| 1193 | DAPP1 | UUGAAGAGCCUGAGAGUAA | NM_014395 |
| 1194 | DAPP1 | GGCCAAAGAUUCUGUUAAA | NM_014395 |
| 1195 | DAPP1 | ACAGAUACUUGGAGGCUUA | NM_014395 |
| 1196 | DAPP1 | GCACAGGAAUGAACUGAAA | NM_014395 |
| 1197 | DAPP1 | GGAGAAGACUGAUCACAAA | NM_014395 |
| 1198 | DAPP1 | GAGAAAGGGUGAUAAAGUA | NM_014395 |
| 1199 | DAPP1 | GGGAGUAACACUAAAGCUA | NM_014395 |
| 1200 | DAPP1 | GGAGCAAGGUGGAAUGUUU | NM_014395 |
| 1201 | DAPP1 | CACUAAAGCUACAAGAAAU | NM_014395 |
| 1202 | DAPP1 | GCUGCAAAGCUAUGAUAUA | NM_014395 |
| 1203 | DAPP1 | GGGCAAUUAGGUAGUAUAA | NM_014395 |
| 1204 | DAPP1 | GGUAAUAAUGUGUUCCAAA | NM_014395 |
| 1205 | DAPP1 | ACACUAAAGCUACAAGAAA | NM_014395 |
| 1206 | DAPP1 | GGACAGUGUAUUAUAACAA | NM_014395 |
| 1207 | DAPP1 | GCAAAUAGAAGAAUGAGAU | NM_014395 |
| 1208 | DAPP1 | GGUAAAUGAAGGUACAAUU | NM_014395 |
| 1209 | DAPP1 | CCAAAGGGAUACCUGAUUA | NM_014395 |
| 1210 | DAPP1 | CUGCAAAGCUAUGAUAUAA | NM_014395 |
| 1211 | DAPP1 | GGAAUGAACUGAAAUACUU | NM_014395 |
| 1212 | DAPP1 | AGAUUAUGCUGCAAAGCUA | NM_014395 |
| 1213 | DAPP1 | GGUCGUUCAUCUUUAAAUA | NM_014395 |
| 1214 | DAPP1 | ACAGGAAUGAACUGAAAUA | NM_014395 |
| 1215 | DAPP1 | CAAGAUAUUACGCUGGAAA | NM_014395 |
| 1216 | DAPP1 | GGUCAGGAGUUCAACAUCA | NM_014395 |
| 1217 | DAPP1 | UUUCAAGGACAGUGUAUUA | NM_014395 |
| 1218 | DAPP1 | GAGUAACACUAAAGCUACA | NM_014395 |
| 1219 | DAPP1 | AGGAGAAGACUGAUCACAA | NM_014395 |
| 1220 | DAPP1 | GGGCCAAAGAUUCUGUUAA | NM_014395 |
| 1221 | DKFZP566K0524 | CAACCAAGCAACAGAGAAA | NM_015605 |
| 1222 | DKFZP566K0524 | GAAAUUACCAAGUGGGUUU | NM_015605 |
| 1223 | DKFZP566K0524 | GGGAAGCAUUUCAUGGAUA | NM_015605 |
| 1224 | DKFZP566K0524 | AAGCAGAAGACUUGAAUUU | NM_015605 |
| 1225 | DKFZP566K0524 | UAAACGAUUAUGAGGGAAA | NM_015605 |
| 1226 | DKFZP566K0524 | AAACAGAUACCGAGAUAUU | NM_015605 |
| 1227 | DKFZP566K052A | GAGCAGAGCCUGUAAACGA | NM_015605 |
| 1228 | DKFZP566K0524 | GUUAAUUCAGAGAAGGUAA | NM_015605 |
| 1229 | DKFZP566K052A | GGGAAAUGACUCUGAAGCA | NM_015605 |
| 1230 | DKFZP566K0524 | GGCCCAAAUGAGAGAACAA | NM_015605 |
| 1231 | DKFZP566K0524 | GUGACAAGCUAUACCUAAU | NM_015605 |
| 1232 | DKFZP566K0524 | GGGAAUCAACCAAGCAACA | NM_015605 |
| 1233 | DKFZP566K0524 | GGUGAUCAGUGUUUACUUA | NM_015605 |
| 1234 | DKFZP566K0524 | GCUCAGAUUCGGCCAUUAA | NM_015605 |
| 1235 | DKFZP566K0524 | GAGUGUUUGUACAGUUUAA | NM_015605 |
| 1236 | DKFZP566K0524 | UCAAUGGAGAUCAGAAUAU | NM_015605 |
| 1237 | DKFZP566K0524 | AAACGAAGGAGCAGUAUCA | NM_015605 |
| 1238 | DKFZP566K0524 | GAAAACACACCUAGAUCAA | NM_015605 |
| 1239 | DKFZP566K0524 | GCGCAAAAUUGUUUCUGAA | NM_015605 |
| 1240 | DKFZP566K0524 | GAGAACAUAAGGCCAAUAA | NM_015605 |
| 1241 | DKFZP566K0524 | GGACUAACUUUGGACACAA | NM_015605 |
| 1242 | DKFZP566K0524 | GGCUUUAGAACUUAAGAAU | NM_015605 |
| 1243 | DKFZP566K0524 | AGAAGAGACAGGUGGAGCA | NM_015605 |
| 1244 | DKFZP566K0524 | UGUAAACGAUUAUGAGGGA | NM_015605 |
| 1245 | DKFZP566K0524 | GAAAAGAUGUGGCCAUUAU | NM_015605 |
| 1246 | DKFZP566K0524 | CAAAAUAACUUCCCACAUU | NM_015605 |
| 1247 | DKFZP566K0524 | CAUUUCAACAUCAUGGAUA | NM_015605 |
| 1248 | DKFZP566K0524 | CAAAAUUGUUUCUGAAGGA | NM_015605 |
| 1249 | DKPZP566K0524 | GGGAUUACAGAGCCCAAUA | NM_015605 |
| 1250 | DKFZP566K0524 | CCGAGAUAUUCUUCCAUUU | NM_015605 |
| 1251 | DKFZP761G058 | GGUGAAUAGUCAAGAGAUU | NM_152542 |
| 1252 | DKPZP761G058 | CCUGAAACUAAGAGGAUUA | NM_152542 |
| 1253 | DKFZP761G058 | GGUCAGAAGUGGUGGGAAC | NM_152542 |
| 1254 | DKFZp761G058 | CAAGAAAUGUGGUGGUUUU | NM_152542 |
| 1255 | DKFZP761G058 | GGAAUUAACUUCAUGGUGA | NM_152542 |
| 1256 | DKFZp761G058 | GGAUACACUUGAUGAGAGA | NM_152542 |
| 1257 | DKFZp761G058 | GGAAAGAGCAAAUGAGAAG | NM_152542 |
| 1258 | DKFZP761G058 | UGGCAAACGGAAAGAGAAU | NM_152542 |
| 1259 | DKFZP761G058 | UAGCAGAACCUGAAACUAA | NM_152542 |
| 1260 | DKFZP761G058 | GACAAGAAGUAUUGGAGAU | NM_152542 |
| 1261 | DKFZp761G058 | GCAAACGGAAAGAGAAUGA | NM_152542 |
| 1262 | DKFZp761G058 | CCACUUAGAUAGUAGUUUU | NM_152542 |
| 1263 | DKFZp761G058 | CUGUACAUGUUCAGUAUAA | NM_152542 |
| 1264 | DKFZp761G058 | ACAGAUUGGCAAACGGAAA | NM_152542 |
| 1265 | DKFZP761G058 | UGACCAUACUCCAGAAAGA | NM_152542 |
| 1266 | DKFZp761G058 | GGAGAAAUGUAUUAUGGAU | NM_152542 |
| 1267 | DKFZp761G058 | GAGCAAAUGAGAAGUGGUU | NM_152542 |
| 1268 | DKFZp761G058 | UCAAGAGAUUUGUGACUUU | NM_152542 |
| 1269 | DKFZP761G058 | AAGGAGAAGAACUUGGAAA | NM_152542 |
| 1270 | DKFZP761G058 | AAGAAAGGAUCAAGAAAUG | NM_152542 |
| 1271 | DKFZP761G058 | CUGCAGUAGUAGUGCCUUU | NM_152542 |
| 1272 | DKFZP761G058 | GGACGUAGCCAUCCAGAGA | NM_152542 |
| 1273 | DKFZP761G058 | CAGAUGAGGUCCUGUACUU | NM_152542 |
| 1274 | DKFZp761G058 | CAGCUGGGACUUAGAGUUU | NM_152542 |
| 1275 | DKFZp761G058 | GAUGAGAGUGUCACAUUAA | NM_152542 |
| 1276 | DKFZp761G058 | GAGAAGUGGUUUGGAUACA | NM_152542 |
| 1277 | DKFZp761G058 | GGUGAAAGCAACCAUGCAA | NM_152542 |
| 1278 | DKFZP761G058 | GUAAAUGGCAGGCUUGCAA | NM_152542 |
| 1279 | DKFZp761G058 | ACAAGAAGUAUUGGAGAUU | NM_152542 |
| 1280 | DKFZp761G058 | AGAUGAGAGUGUCACAUUA | NM_152542 |
| 1281 | DLG1 | GAGAAGAACUUAUCAGAGA | NM_004087 |
| 1282 | DLG1 | CAGAAGAACAAGCCAGAAA | NM_004087 |
| 1283 | DLG1 | AGAAGAUGGAGAAGGAAUA | NM_004087 |
| 1284 | DLG1 | CAACAUUGUAGGAGGAGAA | NM_004087 |
| 1285 | DLG1 | GGAGAUGACUCAAGUAUUU | NM_004087 |
| 1286 | DLG1 | GCCCUAGUGUAGAGAAAUA | NM_004087 |
| 1287 | DLG1 | CAAGAUACCCAGAGAGCAU | NM_004087 |
| 1288 | DLG1 | GCGUCUAACAGAAGAACAA | NM_004087 |
| 1289 | DLG1 | ACUUCAGAUUGGAGAUAAA | NM_004087 |
| 1290 | DLG1 | AGAACAAGGACCAGAGUGA | NM_004087 |
| 1291 | DLG1 | GAAUAAGCGUCUAACAGAA | NM_004087 |
| 1292 | DLG1 | AGAAGUUACUCAUGAAGAA | NM_004087 |
| 1293 | DLG1 | CCUAUGAAAGACAGGAUAA | NM_004087 |
| 1294 | DLG1 | GAAACAGAUCAUAGAAGAA | NM_004087 |
| 1295 | DLG1 | GAGAAGAUGGAGAAGGAAU | NM_004087 |
| 1296 | DLG1 | UCCUAAAGGUCUUGGGUUU | NM_004087 |
| 1297 | DLG1 | AGGAGAAGAUGGAGAAGGA | NM_004087 |
| 1298 | DLG1 | CCAUAGAACGGGUUAUUAA | NM_004087 |
| 1299 | DLG1 | GGUAGAUGGAAGAGAUUAU | NM_004087 |
| 1300 | DLG1 | CAAGAGAGCAGAUGGAAAA | NM_004087 |
| 1301 | DLG1 | CCACCAUACCACAGGCAAA | NM_004087 |
| 1302 | DLG1 | CCUCAUACAACUAGACCAA | NM_004087 |
| 1303 | DLG1 | UAUCAGAGAUUGAGAAUGU | NM_004087 |
| 1304 | DLG1 | UCAAGAGAGCAGAUGGAAA | NM_004087 |
| 1305 | DLG1 | GUAUAUGAAUGAUGGCUAU | NM_004087 |
| 1306 | DLG1 | UGGAAAUGCCAUAAAGAGA | NM_004087 |
| 1307 | DLG1 | UGAUGAAAUUACAAGGGAA | NM_004087 |
| 1308 | DLG1 | CGAUGAGGUCGGAGUGAUU | NM_004087 |
| 1309 | DLG1 | CGGAGGACCUGCUGAUCUA | NM_004087 |
| 1310 | DLG1 | UAGUAUUAGUUCAGGGUCA | NM_004087 |
| 1311 | DLG7 | GCAAUGAGAGAGAGAAUUA | NM_014750 |
| 1312 | DLG7 | GGAAGAAUGUGCUGAAACA | NM_014750 |
| 1313 | DLG7 | GUACAGAUCUGGAUGGAUU | NM_014750 |
| 1314 | DLG7 | CUGGAUGGAUUUUGGGAUA | NM_014750 |
| 1315 | DLG7 | GGAUGAUGCUGGAAGAAUU | NM_014750 |
| 1316 | DLG7 | GAAAGAGCAGAGAGAGAAA | NM_014750 |
| 1317 | DLG7 | GGAUAUAAGUACUGAAAUG | NM_014750 |
| 1318 | DLG7 | GAAGAAUUGCAGCGAGAAA | NM_014750 |
| 1319 | DLG7 | GGUUGAUGAUUGUGAAUAU | NM_014750 |
| 1320 | DLG7 | CUGAAGACCUAUCAAGUAA | NM_014750 |
| 1321 | DLG7 | GAGCAGAGAGAGAAAGCUA | NM_014750 |
| 1322 | DLG7 | UGGAAGAAUUGCAGCGAGA | NM_014750 |
| 1323 | DLG7 | AAGGAAAGGUGCCAAGUAA | NM_014750 |
| 1324 | DLG7 | CUGUGAAAGCUGAGCCAAA | NM_014750 |
| 1325 | DLG7 | GAGCAGACUAAGAUUGAUA | NM_014750 |
| 1326 | DLG7 | GCAGAGAGAGAAAGCUAAA | NM_014750 |
| 1327 | DLG7 | AGUUGAAAGUCCUGUUAAA | NM_014750 |
| 1328 | DLG7 | UUGAAAGAGCAGAGAGAGA | NM_014750 |
| 1329 | DLG7 | GAGGAGACAUCAAGAACAU | NM_014750 |
| 1330 | DLG7 | UGAAAGAAAUGAAGGUCGA | NM_014750 |
| 1331 | DLG7 | GAAAGCUAAACGAGGAAUA | NM_014750 |
| 1332 | DLG7 | AGGUAGAAUUCUUGUUGAA | NM_014750 |
| 1333 | DLG7 | AAACCAGAAUGCUGUGAAA | NM_014750 |
| 1334 | DLG7 | CAAACUACAUCACCAGAAA | NM_014750 |
| 1335 | DLG7 | CGAACGAAAUAGACACUUU | NM_014750 |
| 1336 | DLG7 | AGACUAAGAUUGAUAACGA | NM_014750 |
| 1337 | DLG7 | UGCAAUGAGAGAGAGAAMU | NM_014750 |
| 1338 | DLG7 | GGUCUAAACUGCAGUAAUC | NM_014750 |
| 1339 | DLG7 | CAGAAAAGACCAAUGUUAA | NM_014750 |
| 1340 | DLG7 | GAGAAAGCUAAACGAGGAA | NM_014750 |
| 1341 | DNAJC6 | GGAAAUGGAUCCUGAGAAA | NM_014787 |
| 1342 | DNAJC6 | AGAUAAAGCUACUGGGCAA | XM_375737 |
| 1343 | DNAJC6 | GAAUAGGAGUUAAGGGAAU | NM_014787 |
| 1344 | DNAJC6 | GGGAAAGGAUCAAGUAAUU | NM_014787 |
| 1345 | DNAJC6 | GGAAACAGGUGGUAAAGUA | NM_014787 |
| 1346 | DNAJC6 | GGAAUGGAUUGAAGGCAAA | NM_014787 |
| 1347 | DNAJC6 | GAAUAGGAUUAAUGAGCAA | NM_014787 |
| 1348 | DNAJC6 | GUACUAAACCGUUAAGUUA | NM_014787 |
| 1349 | DNAJC6 | GCACAGAUUUUGAACGAAU | NM_014787 |
| 1350 | DNAJC6 | AGGAAAUGGCCAAGGAAAU | XM_375737 |
| 1351 | DNAJC6 | GGAAACAAAUGCUGUAAUU | NM_014787 |
| 1352 | DNAJC6 | UGAAGAAGGUGUACAGGAA | NM_014787 |
| 1353 | DNAJC6 | UGGAAUGGAUUGAAGGCAA | XM_375737 |
| 1354 | DNAJC6 | CCAGAACGAACGUGGGAAA | XM_375737 |
| 1355 | DNAJC6 | GAUUGAAGGCAAAGAAAGA | NM_014787 |
| 1356 | DNAJC6 | GAAUGAAAAUGGUGGCUAA | NM_014787 |
| 1357 | DNAJC6 | CCACCAACUUUCUGACUAA | NM_014787 |
| 1358 | DNAJC6 | GAAACAAAGUCUCAGAUAU | NM_014787 |
| 1359 | DNAJC6 | GAGGAAAUGGCCAAGGAAA | NM_014787 |
| 1360 | DNAJC6 | GAAAGAAUAUCGUGUCCAA | NM_014787 |
| 1361 | DNAJC6 | GGACAGGCUCCAAUAGAUA | NM_014787 |
| 1362 | DNAJc6 | CUACACAAAGGGAGAUUUA | NM_014787 |
| 1363 | DNAJC6 | CAUAAACUGUUCAAGGUAA | NM_014787 |
| 1364 | DNAJC6 | GAAUCAGGAAAGUGAGCAA | XM_375737 |
| 1365 | DNAJC6 | GAGCAGUUGUGGUAAGAGA | NM_014787 |
| 1366 | DNAJC6 | CAAGUAAUUUGGAAGGGAA | XM_375737 |
| 1367 | DNAJC6 | GAAAGGAGGAAAUGGCCAA | XM_375737 |
| 1368 | DNAJC6 | UGACAGGAUUUCUGGAUUU | NM_014787 |
| 1369 | DNAJC6 | GUAGAUAUUGUGUGAACUA | NM_014787 |
| 1370 | DNAJC6 | CAACUUAUCAGGACCAAUA | NM_014787 |
| 1371 | DUSP1 | GGACGAGGCCUUUGAGUUU | NM_004417 |
| 1372 | DUSP1 | CAGUUAUGGUGAUGACUUA | NM_004417 |
| 1373 | DUSP1 | CGUCAAGACAUUUGCUGAA | NM_004417 |
| 1374 | DUSP1 | CGAACAGUGCGCUGAGCUA | NM_004417 |
| 1375 | DUSP1 | AAGCAGAGGCGAAGCAUCA | NM_004417 |
| 1376 | DUSP1 | CAUCAAGAAUGCUGGAGGA | NM_004417 |
| 1377 | DUSP1 | GCAUAACUGCCUUGAUCAA | NM_004417 |
| 1378 | DUSP1 | UGAGAGGAGAAAUGCAAUA | NM_004417 |
| 1379 | DUSP1 | CCUUUGAGUUUGUGAAGCA | NM_004417 |
| 1380 | DUSP1 | GAAAGGACUCAGUGUGUGA | NM_004417 |
| 1381 | DUSP1 | GUACCUGGGCAGUGCGUAU | NM_004417 |
| 1382 | DUSP1 | GAGAAAGGACUCAGUGUGU | NM_004417 |
| 1383 | DUSP1 | CAAGAAUGCUGGAGGAAGG | NM_004417 |
| 1384 | DUSP1 | CGAGAGGGCUGGUCCUUAU | NM_004417 |
| 1385 | DUSP1 | AGGACAACCACAAGGCAGA | NM_004417 |
| 1386 | DUSP1 | CCAUGGGCCUGGAGCACAU | NM_004417 |
| 1387 | DUSP1 | GCGACGACACAUAUACAUA | NM_004417 |
| 1388 | DUSP1 | GAUCAACGUCUCAGCCAAU | NM_004417 |
| 1389 | DUSP1 | AAAUACCAGUGUUGGGUUU | NM_004417 |
| 1390 | DUSP1 | GUUGUAUGUUUGCUGAUUA | NM_004417 |
| 1391 | DUSP1 | AGGAGGAUACGAAGCGUUU | NM_004417 |
| 1392 | DUSP1 | GAGAGGAGAAAUGCAAUAA | NM_004417 |
| 1393 | DUSP1 | GCAUCCCUGUGGAGGACAA | NM_004417 |
| 1394 | DUSP1 | ACAUCMGUCCAUCUGACAA | NM_004417 |
| 1395 | DUSP1 | GAGGAGAAAUGCAAUAACU | NM_004417 |
| 1396 | DUSP1 | UCAUAGACUCCAUCAAGAA | NM_004417 |
| 1397 | DUSP1 | GGUCACUACCAGUACAAGA | NM_004417 |
| 1398 | DUSP1 | GACUUAGCGUCAAGACAUU | NM_004417 |
| 1399 | DUSP1 | GAGGAAGGGUGUUUGUCCA | NM_004417 |
| 1400 | DUSP1 | GGAGAAAUGCAAUAACUCU | NM_004417 |
| 1401 | DUSP10 | CCAUAAACCUUGUUACAUA | NM_007207 |
| 1402 | DUSP10 | GCUGAAUGAUAGACAAAUA | NM_144729 |
| 1403 | DUSP10 | GCCAGAUGGUGGAGGAAUA | NM_144729 |
| 1404 | DUSP10 | GCAAAGAAGAUGACCAAAU | NM_007207 |
| 1405 | DUSPl0 | GGUCAACAAUAAUGAGAAU | NM_007207 |
| 1406 | DUSP10 | GCUUGGAGAUAGAAAGGAA | NM_007207 |
| 1407 | DUSP10 | GAGCAGGUGUUCAUGAUAA | NM_144728 |
| 1408 | DUSP10 | CCACAAACUGACAAAUUAA | NM_144728 |
| 1409 | DUSP10 | UCAAUGAAGCCGAGUGAAU | NM_144729 |
| 1410 | DUSP10 | GCAAAGAACCUCUGGUGUU | NM_007207 |
| 1411 | DUSP10 | GUAAGUUUGUGAAUGGAAA | NM_007207 |
| 1412 | DUSP10 | UGCUAGAGUUCGAGGAAGA | NM_144728 |
| 1413 | DUSP10 | ACAAUGGUCUGGAUGGAAA | NM_144728 |
| 1414 | DUSP10 | AGAAAGGCCUGUUCAACUA | NM_007207 |
| 1415 | DUSP10 | GAGGAUGGAUUCUGGUUUU | NM_144728 |
| 1416 | DUSP10 | GAAGAGAGAAGGCAAAGAA | NM_007207 |
| 1417 | DUSP10 | GAGGAUAGCCAAUGAUCAU | NM_144728 |
| 1418 | DUSP10 | CCAAAUGCAGCAAGAGUCA | NM_007207 |
| 1419 | DUSP10 | CGAAGAUACUACACACUUU | NM_144728 |
| 1420 | DUSP10 | GCUCACUGGUGCAAAGAGA | NM_007207 |
| 1421 | DUSP10 | CCUAAACAACGGUGUGACA | NM_144729 |
| 1422 | DUSP10 | UAAGAAUCCUUCAGGCAUU | NM_144728 |
| 1423 | DUSP10 | CCCACAAACUGACAAAUUA | NM_007207 |
| 1424 | DUSP10 | GAUCAAUGAAGCCGAGUGA | NM_007207 |
| 1425 | DUSP10 | UGAGGAAGGAGGAUGGAUU | NM_144729 |
| 1426 | DUSP10 | GGAAGAUGCUCUGGUGGUA | NM_144728 |
| 1427 | DUSP10 | CCAAGGAGCUGUCCACAUU | NM_007207 |
| 1428 | DUSP10 | GUUCAUAGACCGAAGAUAC | NM_144728 |
| 1429 | DUSP10 | UGACAAAUUAAGGAGGUUA | NM_144728 |
| 1430 | DUSP10 | GAAACAACACGGAUCAAGA | NM_144728 |
| 1431 | DUSP11 | GGGAAUGGACCCAGUGAUA | NM_003584 |
| 1432 | DUSP11 | AAACAAGGACCUAGGUAUA | NM_003584 |
| 1433 | DUSP11 | GAAACUUGCUCCAGAAGAA | NM_003584 |
| 1434 | DUSP11 | UAACAAAAUCCGAGAACAA | NM_003584 |
| 1435 | DUSP11 | CCAGAGGAUUUGCCAGAAA | NM_003584 |
| 1436 | DUSP11 | CCACAAUAAGCCUGUUAAA | NM_003584 |
| 1437 | DUSP11 | GUAUUCAAGCUUAAGGAAA | NM_003584 |
| 1438 | DUSP11 | GCUGAUAAAUUUGCAGUAA | NM_003584 |
| 1439 | DUSP11 | GGGACAUUGCUUAGAAAGA | NM_003584 |
| 1440 | DUSP11 | GAACUGAAGCAUUGAGAAC | NM_003584 |
| 1441 | DUSP11 | CCAAGAAGAAGGGCGGAAA | NM_003584 |
| 1442 | DUSP11 | CCACUGUACCCAUGGUUUA | NM_003584 |
| 1443 | DUSP11 | GGUGGUAUCCUUAUAAUUA | NM_003584 |
| 1444 | DUSP11 | UGAAGAACUUGGACUGAUU | NM_003584 |
| 1445 | DUSP11 | CCGAAAGGUGGAAAGACUA | NM_003584 |
| 1446 | DUSP11 | GUACCCAGGUCAAGUGAUU | NM_003584 |
| 1447 | DUSP11 | GUGUGUUUAUGUACAGAAA | NM_003584 |
| 1448 | DUSP11 | GAAUGGACCCAGUGAUACA | NM_003584 |
| 1449 | DUSP11 | ACUGAAGCAUUGAGAACUU | NM_003584 |
| 1450 | DUSP11 | CGAAAGGUGGAAAGACUAU | NM_003584 |
| 1451 | DUSP11 | GAAAAUUACUGGUGUGACU | NM_003584 |
| 1452 | DUSP11 | GGAGAGGACUAUUCACACA | NM_003584 |
| 1453 | DUSP11 | CAGAGAAUCCACAUGUUUA | NM_003584 |
| 1454 | DUSP11 | CCUUAUGUAUUCAAGCUUA | NM_003584 |
| 1455 | DUSP11 | CCCGAAAGGUGGAAAGACU | NM_003584 |
| 1456 | DUSP11 | GGAUAGAAGAAGGUGGUAU | NM_003584 |
| 1457 | DUSP11 | GGUCCUAUCAGAAAGAAUU | NM_003584 |
| 1458 | DUSP11 | CAGAAUGGUCCUAUCAGAA | NM_003584 |
| 1459 | DUSP11 | GAACUUCCCUUGCAAAUUA | NM_003584 |
| 1460 | DUSP11 | CCUCUUUGCUGAUAAAUUU | NM_003584 |
| 1461 | DUSP12 | UGAAAUGGGAGAAGAUAAA | NM_007240 |
| 1462 | DUSP12 | GAACAGUGCUCUUGUGGUA | NM_007240 |
| 1463 | DUSP12 | GGAAGAAACUUGCAGAUGA | NM_007240 |
| 1464 | DUSP12 | GUGGAUACCUCUAGUGCAA | NM_007240 |
| 1465 | DUSP12 | AGAAUAGAGUGGAUGAAAU | NM_007240 |
| 1466 | DUSP12 | GAAGAAACUUGCAGAUGAU | NM_007240 |
| 1467 | DUSP12 | UGAAGGAAGUGGACCUAUA | NM_007240 |
| 1468 | DUSP12 | ACAUAAGAAUAGAGUGGAU | NM_007240 |
| 1469 | DUSP12 | ACAGAGAAGUAUCCAGAAU | NM_007240 |
| 1470 | DUSP12 | UGAAAUUAUACCAGGCAAU | NM_007240 |
| 1471 | DUSP12 | GAUGUAACCUGGAAACUAU | NM_007240 |
| 1472 | DUSP12 | GAUGAUAUGUGCUGCCUUU | NM_007240 |
| 1473 | DUSP12 | UCACAAGGAUUGAAAGAUG | NM_007240 |
| 1474 | DUSP12 | UGUAGAAAGUGCAGGCGAU | NM_007240 |
| 1475 | DUSP12 | AACCAGAGGCUAAGAUGAA | NM_007240 |
| 1476 | DUSP12 | UAGAGUGGAUGAAAUGAAA | NM_007240 |
| 1477 | DUSP12 | UAUACCAGGCAAUGGGAUA | NM_007240 |
| 1478 | DUSP12 | UCUUGUGGUAGGUGGAUAA | NM_007240 |
| 1479 | DUSP12 | GAUUGAAAGAUGAGGUUCU | NM_007240 |
| 1480 | DUSP12 | GGAUACCUCUAGUGCAAUU | NM_007240 |
| 1481 | DUSP12 | GAGGCAAGCUCAAUGUACA | NM_007240 |
| 1482 | DUSP12 | GAAUAGAGUGGAUGAAAUG | NM_007240 |
| 1483 | DUSP12 | CCUGUACAGUGGAUGGAAU | NM_007240 |
| 1484 | DUSP12 | CGAAGUGUGGCCAUAAUAA | NM_007240 |
| 1485 | DUSP12 | AAGAUGAGGUUCUCUACAA | NM_007240 |
| 1486 | 0USP12 | AGUGAUGGAUGGACAGCUU | NM_007240 |
| 1487 | 0USP12 | UGGACAAACCCGAGACGGA | NM_007240 |
| 1488 | DUSP12 | AGAAAGUGCAGGCGAUCAU | NM_007240 |
| 1489 | DUSP12 | CUGAAAUUAUACCAGGCAA | NM_007240 |
| 1490 | DUSP12 | UGGGAGUGAUGGAUGGACA | NM_007240 |
| 1491 | DUSP13 | CCUGAGAUGUAAACAGCAA | NM_016364 |
| 1492 | DUSP13 | CCUCUUAGCGGGUGGAUUU | NM_016364 |
| 1493 | DUSP13 | AAAUAUUCAUCGUCGCAAA | NM_016364 |
| 1494 | DUSP13 | CAGAGAUUCUUUAUGCAAA | NM_016364 |
| 1495 | DUSP13 | GUGGAAUGUCCCUGGAGUA | NM_016364 |
| 1496 | DUSP13 | GAAUGUCCCUGGAGUACUA | NM_016364 |
| 1497 | DUSP13 | CAGUCCAUCUCUAUAAUAA | NM_016364 |
| 1498 | DUSP13 | CUAGUGACCCUGAGAUGUA | NM_016364 |
| 1499 | DUSP13 | GGAUGGACUCACUGCAGAA | NM_016364 |
| 1500 | DUSP13 | GUGCAGGCCCACCGCAAUA | NM_016364 |
| 1501 | DUSP13 | GGUGGACACAGGUGCCAAA | NM_016364 |
| 1502 | DUSP13 | CAUCAAGUGUGCGGAGACA | NM_016364 |
| 1503 | DUSP13 | AGAACAUGACGCUGGUAGA | NM_016364 |
| 1504 | DUSP13 | CCAGAUACUCCCACAGGAU | NM_016364 |
| 1505 | DUSP13 | GGGACAAGAGCAAGCUGAU | NM_016364 |
| 1506 | DUSP13 | UGAGGCAGAGGCAGGGAUA | NM_016364 |
| 1507 | DUSP13 | GCCAAAUUCUACCGUGGAA | NM_016364 |
| 1508 | DUSP13 | UGGCCUUCCUCAUGAUCUA | NM_016364 |
| 1509 | DUSP13 | GGACACAGGUGCCAAAUUC | NM_016364 |
| 1510 | DUSP13 | GUUCAGUCCAUCUCUAUAA | NM_016364 |
| 1511 | DUSP13 | UCAGAGAUUCUUUAUGCAA | NM_016364 |
| 1512 | DUSP13 | CGAACUGCCCGUCAGAGAA | NM_016364 |
| 1513 | DUSP13 | ACACAGGUGCCAAAUUCUA | NM_016364 |
| 1514 | DUSP13 | CCAAUUCAGAGAUUCUUUA | NM_016364 |
| 1515 | DUSP13 | CUGCCACACUGAACCAUAU | NM_016364 |
| 1516 | DUSP13 | GGAGACAGGCGGCUGAAAG | NM_016364 |
| 1517 | DUSP13 | UGGACUCACUGCAGAAGCA | NM_016364 |
| 1518 | DUSP13 | GCACGAACUGCCCGUCAGA | NM_016364 |
| 1519 | DUSP13 | GGAUUUCCCUGACCCAAUU | NM_016364 |
| 1520 | DUSP13 | GCUGCCACACUGAACCAUA | NM_016364 |
| 1521 | DUSP14 | GGAAUAGUGUUUAUGGAAA | NM_007026 |
| 1522 | DUSP14 | ACACUGGACUCUUGAGGAA | NM_007026 |
| 1523 | DUSP14 | CAUUAACCCUUUAGAGACA | NM_007026 |
| 1524 | DUSP14 | GGACAUAAAGGGAAUGCAU | NM_007026 |
| 1525 | DUSP14 | GGAUGAUUUCCGAGGGAGA | NM_007026 |
| 1526 | DUSP14 | UCGCGUACCUGAUGAAAUU | NM_007026 |
| 1527 | DUSP14 | AGGAAGAAGGAGACUCUAA | NM_007026 |
| 1528 | DUSP14 | UUUGGGAAGUCGACAGUUA | NM_007026 |
| 1529 | DUSP14 | AAUGAAAUCUGCUGCAAAA | NM_007026 |
| 1530 | DUSP14 | AUACAUUGCUAGUCACAUU | NM_007026 |
| 1531 | DUSP14 | CAUAGGAGGCAUUGCUCAA | NM_007026 |
| 1532 | DUSP14 | GGAGGCAACUGAUAGACUA | NM_007026 |
| 1533 | DUSP14 | GCAUAGUUCCCGACGUCUA | NM_007026 |
| 1534 | DUSP14 | GGGAGACAUAGGAGGCAUU | NM_007026 |
| 1535 | DUSP14 | UGGAAUAGUGUUUAUGGAA | NM_007026 |
| 1536 | DUSP14 | GACAUAAAGGGAAUGCAUA | NM_007026 |
| 1537 | DUSP14 | CCAUUGAGAUCCCUAAUUU | NM_007026 |
| 1538 | DUSP14 | CGGACCAGACAGAUGCUUA | NM_007026 |
| 1539 | DUSP14 | GGAAGAAGGAGACUCUAAU | NM_007026 |
| 1540 | DUSP14 | GGUCACAGCACGCUACCAA | NM_007026 |
| 1541 | DUSP14 | UAAUGAAAUCUGCUGCAAA | NM_007026 |
| 1542 | DUSP14 | UGAUAGACUACGAGCGCCA | NM_007026 |
| 1543 | DUSP14 | AUGCAUACAUUGCUAGUCA | NM_007026 |
| 1544 | DUSP14 | CUGACAAGAUCCACAGUGU | NM_007026 |
| 1545 | DUSP14 | AGAAGGAGACUCUAAUUUU | NM_007026 |
| 1546 | DUSP14 | GAGGCAUACAACUGGGUGA | NM_007026 |
| 1547 | DUSP14 | UUAGUGACUCUGUAAGUAA | NM_007026 |
| 1548 | DUSP14 | GGUUCUCCCUCAAGUGUUU | NM_007026 |
| 1549 | DUSP14 | AGGAGGAGCUCAGUGCAAA | NM_007026 |
| 1550 | DUSP14 | AAGAAGGAGACUCUAAUUU | NM_007026 |
| 1551 | DUSP15 | GAGGGAGAGUGGAGGGUUU | NM_080611 |
| 1552 | DUSP15 | UUAAAGAGACACAGAAGAA | NM_080611 |
| 1553 | DUSP15 | CGAAAUAAGAUCACACACA | NM_080611 |
| 1554 | DUSP15 | GGAGGGUAUUAAAGAGACA | NM_080611 |
| 1555 | DUSP15 | UGACGGGCCUGGAGGGUAU | NM_080611 |
| 1556 | DUSP15 | GCAGCAGCUUGAAGAGUUU | NM_080611 |
| 1557 | DUSP15 | GAAAUAAGAUCACACACAU | NM_080611 |
| 1558 | DUSP15 | GAAACUUCAUUGAUGCCAA | NM_080611 |
| 1559 | DUSP15 | GGUAUUAAAGAGACACAGA | NM_080611 |
| 1560 | DUSP15 | AAACUUCAUUGAUGCCAAA | NM_080611 |
| 1561 | DUSP15 | AUGCCAAAGACCUGGAUCA | NM_080611 |
| 1562 | DUSP15 | CCAAAGACCUGGAUCAGCU | NM_080611 |
| 1563 | DUSP15 | GGGCCUGGAGGGUAUUAAA | NM_080611 |
| 1564 | DUSP15 | GCGUAUGUGAUGACUGUGA | NM_080611 |
| 1565 | DUSP15 | GAUCAGCUGGGCCGAAAUA | NM_080611 |
| 1566 | DUSP15 | GUAUUAAAGAGACACAGAA | NM_080611 |
| 1567 | DUSP15 | GCUUUAGGCAGCAGCUUGA | NM_177991 |
| 1568 | DUSP15 | CAGCGUAUGUGAUGACUGU | NM_080611 |
| 1569 | DUSP15 | GGCAGCAGCUUGAAGAGUU | NM_080611 |
| 1570 | DUSP15 | UGGAUCAGCUGGGCCGAAA | NM_080611 |
| 1571 | DUSP15 | CAGCUGGGCCGAAAUAAGA | NM_080611 |
| 1572 | DUSP15 | CAAAGAAUGUAUCAACUUC | NM_080611 |
| 1573 | DUSP15 | AAUAAGAUCACACACAUCA | NM_080611 |
| 1574 | DUSP15 | GCCUGGAGGGUAUUAAAGA | NM_080611 |
| 1575 | DUSP15 | UCACACACAUCAUCUCUAU | NM_080611 |
| 1576 | DUSP15 | GCCGAAAUAAGAUCACACA | NM_080611 |
| 1577 | DUSP15 | GGGCCGAAAUAAGAUCACA | NM_080611 |
| 1578 | DUSP15 | GGUACUUCCUGGACUCUAC | NM_080611 |
| 1579 | DUSP15 | AUCCACUGCUGCCGCCUUA | NM_080611 |
| 1580 | DUSP1s | GACUCUACCUCGGAAACUU | NM_080611 |
| 1581 | DUSP16 | CAGAAGAUGCUUUGGAAUA | NM_030640 |
| 1582 | DUSP16 | GGACAUGUCUUUAGAUGAA | NM_030640 |
| 1583 | DUSP16 | CGGCAGAAGCCAAGUGACA | NM_030640 |
| 1584 | DUSP16 | CAUCAGGGCCAAAGAGCAA | NM_030640 |
| 1585 | DUSP16 | UGACAGCUUUUGUGAGAAA | NM_030640 |
| 1586 | DUSP16 | AGAAGAAGAUUAAGAACCA | NM_030640 |
| 1587 | DUSP16 | GCUGGAAAGUGGAACGGAA | NM_030640 |
| 1588 | DUSP16 | GCAAUAAGCUCAAGCGUUC | NM_030640 |
| 1589 | DUSP16 | UCACUGUACUUCUGGGUAA | NM_030640 |
| 1590 | DUSP16 | CUGGAAAGUGGAACGGAAA | NM_030640 |
| 1591 | DUSP16 | GUCAGAAGGUUGUAGUUUA | NM_030640 |
| 1592 | DUSP16 | GUGUUAAAUGCCAGCAAUA | NM_030640 |
| 1593 | DUSP16 | UGGGAUUGGUUAUGUGUUA | NM_030640 |
| 1594 | DUSP16 | CAUCCAGCAUUCAGCGAAA | NM_030640 |
| 1595 | DUSP16 | GGACAAAGUGUUAAUUACA | NM_030640 |
| 1596 | DUSP16 | GUGGGAGCGUGGAGGACAA | NM_030640 |
| 1597 | DUSP16 | CUUACAGAUUUGUGAAAGA | NM_030640 |
| 1598 | DUSP16 | GGUUGUAGUUUACGAUCAA | NM_030640 |
| 1599 | DUSP16 | GACUAUGAGAAGAAGAUUA | NM_030640 |
| 1600 | DUSP16 | CUCAGAGGGUGGACAGAAA | NM_030640 |
| 1601 | DUSP16 | GCAGAAUGGGAUUGGUUAU | NM_030640 |
| 1602 | DUSP16 | GCAGAAGCCAAGUGACAGA | NM_030640 |
| 1603 | DUSP16 | CAGCGAAACAUAAGGUUGA | NM_030640 |
| 1604 | DUSP16 | CUUCAGACAGCCAGAGCAA | NM_030640 |
| 1605 | DUSP16 | GGAGCGUGGAGGACAAUUA | NM_030640 |
| 1606 | DUSP16 | AGAUGAAGCUUACAGAUUU | NM_030640 |
| 1607 | DUSP16 | GAAGGUUGCAACAGGACAA | NM_030640 |
| 1608 | DUSP16 | CAGUAGAUUUCAUUGAGAA | NM_030640 |
| 1609 | DUSP16 | CAGCAUUCAGCGAAACAUA | NM_030640 |
| 1610 | DUSP16 | CCGCAGACAGGCUGGAAGA | NM_030640 |
| 1611 | DUSP18 | GUGAGAUGGUGAAGAUAAA | NM_152511 |
| 1612 | DUSP18 | AGUCAGAGGUACAGAUCUA | NM_152511 |
| 1613 | DUSP18 | GCACAGCACUUUAUUGUUA | NM_152511 |
| 1614 | DUSP18 | UCAACAAUUUCUUGGCAUA | NM_152511 |
| 1615 | DUSP18 | GCAAGAACACUGUGCACAU | NM_152511 |
| 1616 | DUSP18 | GAAUGAAUCUGCUACAAUU | NM_152511 |
| 1617 | DUSP18 | GGACACAGCCUAGCAGAAA | NM_152511 |
| 1618 | DUSP18 | ACCCAGAGCCAGAGCCUUA | NM_152511 |
| 1619 | DUSP18 | UAUGGAAACCAAAGCGUUA | NM_152511 |
| 1620 | DUSP18 | UGUGAGAUGGUGAAGAUAA | NM_152511 |
| 1621 | DUSP18 | ACAAAGUACUCUUCCAAAA | NM_152511 |
| 1622 | DUSP18 | GUACAGAUCUAUUGUUGAU | NM_152511 |
| 1623 | DUSP18 | UCGCCUACCUCAUGAAGUA | NM_152511 |
| 1624 | DUSP18 | ACACGUUGUAUGAGGAUAU | NM_152511 |
| 1625 | DUSP18 | GCACACACAUCCUCAUAAU | NM_152511 |
| 1626 | DUSP18 | GGAAUGAAUCUGCUACAAU | NM_152511 |
| 1627 | DUSP18 | GCACAUGGCAGGCCUGGAA | NM_152511 |
| 1628 | DUSP18 | GAAUGAUCCCUGACAUCUA | NM_152511 |
| 1629 | DUSP18 | GAUCCAAACUUGAACAUUC | NM_152511 |
| 1630 | DUSP18 | CAGAUGGUGCCCAGAAGAA | NM_152511 |
| 1631 | DUSP18 | CAGUGGAGGUAGUGAACAC | NM_152511 |
| 1632 | DUSP18 | ACAGAGUUAUUGUGAAGAU | NM_152511 |
| 1633 | DUSP18 | GAGAUGGUGAAGAUAAAUU | NM_152511 |
| 1634 | DUSP18 | CAUGAAUGAUAGACUCUUU | NM_152511 |
| 1635 | DUSP18 | GCUGUAGCUUUUAACUUUA | NM_152511 |
| 1636 | DUSP18 | GGAGAGAGUUUUCCAUGGA | NM_152511 |
| 1637 | DUSP18 | GCGACGAGCCCAUUGCUAU | NM_152511 |
| 1638 | DUSP18 | AUGAGAAGGAAGUCCGUUU | NM_152511 |
| 1639 | DUSP18 | GGCAAAAGAUGGUGUUAGU | NM_152511 |
| 1640 | DUSP18 | AAACAGAUGAUGCCUUUUA | NM_152511 |
| 1641 | DUSP19 | GUACAUAUCAAGAGGGCAA | NM_080876 |
| 1642 | DUSP19 | GAGCAAGCAUAGAUGGAAA | NM_080876 |
| 1643 | DUSP19 | AAAGUAAAGCUUUGAGUUA | NM_080876 |
| 1644 | DUSP19 | GGAGAAGGGUUAUGGUUUU | NM_080876 |
| 1645 | DUSP19 | GUUUCUAGGUGUUGAUAUA | NM_080876 |
| 1646 | DUSP19 | GCAAUAAGUGUGACAGAAU | NM_080876 |
| 1647 | DUSP19 | GAGUUAACCUAAUGAGUCA | NM_080876 |
| 1648 | DUSP19 | GCUAAGAAGCAGUCUAAAU | NM_080876 |
| 1649 | DUSP19 | CCACAAUCAUUUACAGUUU | NM_080876 |
| 1650 | DUSP19 | GGGUAAGAUUCAAACAUUU | NM_080876 |
| 1651 | DUSP19 | CAAUAAGUGUGACAGAAUA | NM_080876 |
| 1652 | DUSP19 | CCUGAUGAAUUCUGAACAA | NM_080876 |
| 1653 | DUSP19 | CAGAAUUCAUGUUGUGGAA | NM_080876 |
| 1654 | DUSP19 | CAUGAAGCCUUGAUAGAAU | NM_080876 |
| 1655 | DUSP19 | GGGAGAAGGGUUAUGGUUU | NM_080876 |
| 1656 | DUSP19 | GUGACAGAAUACAGGAGAA | NM_080876 |
| 1657 | DUSP19 | UAUCAAGAGGGCAAAGAAA | NM_080876 |
| 1658 | DUSP19 | CUAAGAAGCAGUCUAAAUA | NM_080876 |
| 1659 | DUSP19 | GAAUUCAUGUUGUGGAAGA | NM_080876 |
| 1660 | DUSP19 | AAGAAUAAGGUGACUCAUA | NM_080876 |
| 1661 | DUSP19 | GCUUAGACUCUGAUAAUUU | NM_080876 |
| 1662 | DUSP19 | UGACAACGCUAACUGGAAA | NM_080876 |
| 1663 | DUSP19 | CCAAGUAGUCAUAAAUGUA | NM_080876 |
| 1664 | DUSP19 | GGAAAGUGCAUAUUGAACA | NM_080876 |
| 1665 | DUSP19 | AUAGAACACUCAAGAAGUA | NM_080876 |
| 1666 | DUSP19 | AAGAAAAGAUGGAGUGGUU | NM_080876 |
| 1667 | DUSP19 | GUAUAGGUGUUCUGUCAUA | NM_080876 |
| 1668 | DUSP19 | UGGCCUGGAUUGUGUAUUA | NM_080876 |
| 1669 | DUSP19 | AACGCUAACUGGAAAGAAA | NM_080876 |
| 1670 | DUSP19 | GAACAAACCUCAUUUACCA | NM_080876 |
| 1671 | DUSP2 | CGGGAAAGACCGAAAGGAA | NM_004418 |
| 1672 | DUSP2 | GGAAAGACCGAAAGGAAGA | NM_004418 |
| 1673 | DUSP2 | GAAAUCAGCUAGACGCUAU | NM_004418 |
| 1674 | DUSP2 | AUACAGAACAUUCAGGAUU | NM_004418 |
| 1675 | DUSP2 | GGUUGGAAACUUAGCACUU | NM_004418 |
| 1676 | DUSP2 | CUGUGGAGAUCUUGCCCUA | NM_004418 |
| 1677 | DUSP2 | GGAAGUGAUGGGUGUGUCA | NM_004418 |
| 1678 | DUSP2 | GAGGAGGCUUCGACGGCUU | NM_004418 |
| 1679 | DUSP2 | UACAGAACAUUCAGGAUUU | NM_004418 |
| 1680 | DUSP2 | UCAUUGACUGGGUGAAGAA | NM_004418 |
| 1681 | DUSP2 | GAACAAGCUGUGACAACCA | NM_004418 |
| 1682 | DUSP2 | GGACGAGGCCUUUGACUUC | NM_004418 |
| 1683 | DUSP2 | CCACCAUCUGUCUGGCAUA | NM_004418 |
| 1684 | DUSP2 | AGACCOAGGUGCUGUGUCA | NM_004418 |
| 1685 | OUSP2 | CAGCUGACAUUUAACACUU | NM_004418 |
| 1686 | DUSP2 | UUGGAAACUUAGCACUUUA | NM_004418 |
| 1687 | DUSP2 | CAAGGAACAAGCUGUGACA | NM_004418 |
| 1688 | DUSP2 | GUGCUCAGCUGACAUUUAA | NM_004418 |
| 1689 | DUSP2 | GGCAGGGGUUGGAAACUUA | NM_004418 |
| 1690 | DUSP2 | GCUGCUACCUCCUCAGAGU | NM_004418 |
| 1691 | DUSP2 | CAUUCAGGAUUUGUCAAUA | NM_004418 |
| 1692 | DUSP2 | GAACAUUCAGGAUUUGUCA | NM_004418 |
| 1693 | DUSP2 | CUGCAGGCCUGUGGCAUCA | NM_004418 |
| 1694 | DUSP2 | GGUCCACCACCAUGUUGAA | NM_004418 |
| 1695 | DUSP2 | UGUGCUCAGCUGACAUUUA | NM_004418 |
| 1696 | DUSP2 | GCCAUAGGCUUCAUUGACU | NM_004418 |
| 1697 | DUSP2 | GUUGGAAACUUAGCACUUU | NM_004418 |
| 1698 | DUSP2 | GGAAACUUAGCACUUUAUA | NM_004418 |
| 1699 | DUSP2 | GCUCAGCUGACAUUUAACA | NM_004418 |
| 1700 | DUSP2 | GAGCCCAAGCCCUGUGUUC | NM_004418 |
| 1701 | DUSP21 | GGGAACAGCUCAUCAAUUA | NM_022076 |
| 1702 | DUSP21 | GGGAAGUGGUCAACGUAUU | NM_022076 |
| 1703 | 0USP21 | UUGCGUACCUCAUGAAAUA | NM_022076 |
| 1704 | DUSP21 | ACGUAUUCUUCGAGGGCAU | NM_022076 |
| 1705 | DUSP21 | UGGAAGUGGUCAACGUAUU | NM_022076 |
| 1706 | DUSP21 | CCAAAUAACCAGAAGCUUG | NM_022076 |
| 1707 | DUSP21 | CGGAUGGUGCCUUGUUAAA | NM_022076 |
| 1708 | DUSP21 | GAACUUGAACACUGACAUU | NM_022076 |
| 1709 | DUSP21 | CCUCGGUGGAAGUGGUCAA | NM_022076 |
| 1710 | DUSP21 | UCAACUCGCCGGUAGGUAA | NM_022076 |
| 1711 | DUSP21 | GAAGCUUGUUUCUCAGCAA | NM_022076 |
| 1712 | DUSP21 | GUAACAUCCCUGACAUCUA | NM_022076 |
| 1713 | DUSP21 | AGCCUUACCUUAAUAGAAU | NM_022076 |
| 1714 | DUSP21 | ACGAAUUCAAGCUGUUUAA | NM_022076 |
| 1715 | DUSP21 | GAACUAGCUUGGUAAGUGU | NM_022076 |
| 1716 | DUSP21 | CGGCUGCUAUCCUGAACUA | NM_022076 |
| 1717 | DUSP21 | CAAAUAACCAGAAGCUUGU | NM_022076 |
| 1718 | DUSP21 | ACACCUAGCCUGAGACUUG | NM_022076 |
| 1719 | DUSP21 | GCCGAUAGCUGGUCCUCUU | NM_022076 |
| 1720 | DUSP21 | ACAUAAAGGUGCCUGUUAC | NM_022076 |
| 1721 | DUSP21 | GGUGGGAAGUGGUCAACGU | NM_022076 |
| 1722 | DUSP21 | ACACUGACAUUUUGUUAGU | NM_022076 |
| 1723 | DUSP21 | UCCCUGACAUCUAUGAGAA | NM_022076 |
| 1724 | DUSP21 | GACUGAACUUGAACACUGA | NM_022076 |
| 1725 | DUSP21 | GGUGGAAGUGGUCAACGUA | NM_022076 |
| 1726 | DUSP21 | CUACAGCUUCUCCCAAAUA | NM_022076 |
| 1727 | DUSP21 | GGACCAGCCGCCUUGAUGA | NM_022076 |
| 1728 | DUSP21 | GAGGGCAUUCAGUACAUAA | NM_022076 |
| 1729 | DUSP21 | UGGGAACAGCUCAUCAAUU | NM_022076 |
| 1730 | DUSP21 | UCGAGGGCAUUCAGUACAU | NM_022076 |
| 1731 | DUSP22 | GCAAGAACAAGGUGACACA | NM_020185 |
| 1732 | DUSP22 | GCGGAACAAUUGAGCAAGA | NM_020185 |
| 1733 | DUSP22 | ACGCGGAACAAUUGAGCAA | NM_020185 |
| 1734 | DUSP22 | CCAGAGACGCGGAACAAUU | NM_020185 |
| 1735 | DUSP22 | GGAAGAAUAUGGAGAGAGC | NM_020185 |
| 1736 | DUSP22 | GAACAAUUGAGCAAGAACA | NM_020185 |
| 1737 | DUSP22 | UGACAAGACAUUUCAAAGA | NM_020185 |
| 1738 | DUSP22 | AAGAACAAGGUGACACAUA | NM_020185 |
| 1739 | DUSP22 | UGAAGGAAGAAUAUGGAGA | NM_020185 |
| 1740 | DUSP22 | GAACAAGGUGACACAUAUU | NM_020185 |
| 1741 | DUSP22 | GGCCUAUGUUGGAGGGAGU | NM_020185 |
| 1742 | DUSP22 | UGACACUGGUGAUCGCAUA | NM_020185 |
| 1743 | DUSP22 | CGGCAGUGGCUGAAGGAAG | NM_020185 |
| 1744 | DUSP22 | GAGUUAAAUACCUGUGCAU | NM_020185 |
| 1745 | DUSP22 | CAGUAUCGGCAGUGGCUGA | NM_020185 |
| 1746 | DUSP3 | GGCAGAAGAUGGACGUCAA | NM_004090 |
| 1747 | DUSP3 | CAUCAAGGCCAACGACACA | NM_004090 |
| 1748 | DUSP3 | CGUCUGUGGCUCAGGACAU | NM_004090 |
| 1749 | DUSP3 | UCACAUACCUGGGCAUCAA | NM_004090 |
| 1750 | DUSP3 | CCAACGACACACAGGAGUU | NM_004090 |
| 1751 | DUSP3 | CUACAAGUGUGUCCCAACA | NM_004090 |
| 1752 | DUSP3 | UGAAAGGGCUGCCGACUUC | NM_004090 |
| 1753 | DUSP3 | GAGCUGCCAUGUUUAGGAA | NM_004090 |
| 1754 | DUSP3 | UGACCAGGCUUUGGCUCAA | NM_004090 |
| 1755 | DUSP3 | ACACCAAUGCCAACUUCUA | NM_004090 |
| 1756 | DUSP3 | GGGAGCACAUAAAGAAGCU | NM_004090 |
| 1757 | DUSP3 | UCAUGCACGUCAACACCAA | NM_004090 |
| 1758 | DUSP3 | GAAGAUGGACGUCAAGUCU | NM_004090 |
| 1759 | DUSP3 | UGUCCGAGCUGCCAUGUUU | NM_004090 |
| 1760 | DUSP3 | AGUUCAACCUCAGCGCUUA | NM_004090 |
| 1761 | DUSP3 | GCUGAGGGCAGGUCCUUCA | NM_004090 |
| 1762 | DUSP3 | CAGUUGUCCUGUUUCUGUA | NM_004090 |
| 1763 | DUSP3 | CCAGCUCAAUGACAGACUA | NM_004090 |
| 1764 | DUSP3 | CCUCAGCGCUUACUUUGAA | NM_004090 |
| 1765 | DUSP3 | CCAAUGCCAACUUCUACAA | NM_004090 |
| 1766 | DUSP3 | GUCCUGUUUCUGUAACUUA | NM_004090 |
| 1767 | DUSP3 | CAACCUCAGCGCUUACUUU | NM_004090 |
| 1768 | DUSP3 | ACACAGUCCUGGGCCACUU | NM_004090 |
| 1769 | DUSP3 | GGGCUGCCGACUUCAUUGA | NM_004090 |
| 1770 | DUSP3 | UACAAGGACUCCGGCAUCA | NM_004090 |
| 1771 | DUSP3 | GCAGAAGAUGGACGUCAAG | NM_004090 |
| 1772 | DUSP3 | OAACGACACACAGGAGUUC | NM_004090 |
| 1773 | DUSP3 | GUUAUCGCCUACCUCAUGA | NM_004090 |
| 1774 | DUSP3 | CAACACCAAUGCCAACUUC | NM_004090 |
| 1775 | DUSP3 | CUGUUUCUGUAACUUAUGA | NM_004090 |
| 1776 | DUSP4 | GGAAGAAAGGGAAGAAUUA | NM_001394 |
| 1777 | DUSP4 | GCAAUAAGGACUCCGAAUA | NM_001394 |
| 1778 | DUSP4 | ACUCCAACUUAGAGCAAUA | NM_001394 |
| 1779 | 0USP4 | GCCAAGGACUGGAAGCAUA | NM_057158 |
| 1780 | 0USP4 | AGGAAGAAAGGGAAGAAUU | NM_001394 |
| 1781 | DUSP4 | GGAGGAAGGGAGCUGGAAA | NM_057158 |
| 1782 | DUSP4 | CCAAAGCGCUCCAAGAGAA | NM_057158 |
| 1783 | DUSP4 | CAGUAAGGCUUGAAGUGAU | NM_001394 |
| 1784 | DUSP4 | AGAUGUAGGUGUAAAUUGA | NM_057158 |
| 1785 | DUSP4 | AAAGACAGAUGUAGGUGUA | NM_057158 |
| 1786 | DUSP4 | GGAGGCAGUUCCUGGCUAA | NM_057158 |
| 1787 | DUSP4 | CCAAGGACUGGAAGCAUAA | NM_057158 |
| 1788 | DUSP4 | GGAAGAAUUAGGUUUGAAU | NM_001394 |
| 1789 | DUSP4 | UGUCGUUGUUGUAGUUAAA | NM_001394 |
| 1790 | DUSP4 | AGACAGAUGUAGGUGUAAA | NM_057158 |
| 1791 | DUSP4 | CCACAGAGCCCUUGGACCU | NM_001394 |
| 1792 | DUSP4 | AAGCAAACUCACUAUGUUA | NM_057158 |
| 1793 | DUSP4 | GGAGGAAGAAAGGGAAGAA | NM_001394 |
| 1794 | DUSP4 | GUAACUAAAGACAGAUGUA | NM_057158 |
| 1795 | DUSP4 | GAGUGAAAUUUGACCCUUU | NM_057158 |
| 1796 | DUSP4 | GGGCAAAGGGAUGAGAAGA | NM_001394 |
| 1797 | DUSP4 | UGGCCUACCUGAUGAUGAA | NM_001394 |
| 1798 | DUSP4 | GGUAGUUUCUGCUUACAAA | NM_057158 |
| 1799 | DUSP4 | CGACGAGGCCAGCCAGAAU | NM_001394 |
| 1800 | DUSP4 | GCAUCCCAGUGGAAGAUAA | NM_001394 |
| 1801 | DUSP4 | GAAGAAAAGUUCACUCCAA | NM_057158 |
| 1802 | DUSP4 | GGAAGUAAAUGGUGUCUUG | NM_001394 |
| 1803 | DUSP4 | GUGCAAGGUAGCAUGAUGA | NM_001394 |
| 1804 | DUSP4 | CAAGAGAAAGUGCCAGGAA | NM_057158 |
| 1805 | DUSP4 | GGGAUGAGAAGACAAGUUU | NM_001394 |
| 1806 | DUSP5 | AAGAGAAGAUUGAGAGUGA | NM_004419 |
| 1807 | DUSP5 | GAAGAAAAGCAGUAUGUUA | NM_004419 |
| 1808 | DUSP5 | GAAGAUUGAGAGUGAGAGA | NM_004419 |
| 1809 | DUSP5 | GUAGAUUCCAGGAGGAGAA | NM_004419 |
| 1810 | DUSP5 | GAGAAGAUUGAGAGUGAGA | NM_004419 |
| 1811 | DUSP5 | GAGAAAAGGCAGUUAUGAA | NM_004419 |
| 1812 | DUSP5 | CAGCAACGUGGGAGAAAGA | NM_004419 |
| 1813 | DUSP5 | GUAGCAAGAUGUUGGCUUU | NM_004419 |
| 1814 | DUSP5 | GAAGGAAGGCCAAGCCAUU | NM_004419 |
| 1815 | DUSP5 | CCACUUUCAAGAAGCAAUA | NM_004419 |
| 1816 | DUSP5 | CGGAAUAUCCUGAGUGUUG | NM_004419 |
| 1817 | DUSP5 | CCCAAGAGCAACUGUGAUU | NM_004419 |
| 1818 | DUSP5 | UCACAAGAGAAGAUUGAGA | NM_004419 |
| 1819 | DUSP5 | AGACUUUCUACUCGGAAUA | NM_004419 |
| 1820 | DUSP5 | CAGCAGAAGCCCUGUGGCA | NM_004419 |
| 1821 | DUSP5 | GAGGCAAGGUCCUGGUCCA | NM_004419 |
| 1822 | DUSP5 | GGAGCAUGGUCUCGCCCAA | NM_004419 |
| 1823 | DUSP5 | CAAUAAAUACCUGCAGCAA | NM_004419 |
| 1824 | DUSP5 | CAAAUGGAUCCCUGUGGAA | NM_004419 |
| 1825 | DUSP5 | AGUGUUGCGUGGAUGUAAA | NM_004419 |
| 1826 | DUSP5 | CCAUUUCACAAGAGAAGAU | NM_004419 |
| 1827 | DUSP5 | GAAGGGUACUUGCUAGGUA | NM_004419 |
| 1828 | DUSP5 | GAGACUUUCUACUCGGAAU | NM_004419 |
| 1829 | DUSP5 | AAACUGGGAUGGAGGAAUC | NM_004419 |
| 1830 | DUSP5 | ACUGUGGACUUCUGGGAUU | NM_004419 |
| 1831 | DUSP5 | CAAGAGCAACUGUGAUUUU | NM_004419 |
| 1832 | DUSP5 | UCACCAGGCUUGCAAAUGA | NM_004419 |
| 1833 | DUSP5 | GCAGAAGCCCUGUGGCAAC | NM_004419 |
| 1834 | DUSP5 | GCAACGUGGUACUACUUUU | NM_004419 |
| 1835 | DUSP5 | CCUGAAAUGUUGUGUAGAC | NM_004419 |
| 1836 | DUSP6 | CGGAAUUGGUUAAUACUAA | NM_022652 |
| 1837 | DUSP6 | AGGACAUGCUGUAUAGAUA | NM_001946 |
| 1838 | DUSP6 | CGGAAAUGGCGAUCAGCAA | NM_001946 |
| 1839 | DUSP6 | UCAAGAAGCUCAAGGACGA | NM_001946 |
| 1840 | DUSP6 | GGGAAGGCGAGGCGGAAUU | NM_001946 |
| 1841 | DUSP6 | ACAGGAGAGUUUAAUACAA | NM_001946 |
| 1842 | DUSP6 | ACGCAGGAGAGUUUAAAUA | NM_001946 |
| 1843 | DUSP6 | GAACGAUGCCUAUGACAUU | NM_022652 |
| 1844 | DUSP6 | UGAGAACGCAGGAGAGUUU | NM_001946 |
| 1845 | DUSP6 | AGAGAUUCAUUGACACUAA | NM_001946 |
| 1846 | DUSP6 | UAGAGGAGCCAAAGAGAGA | NM_022652 |
| 1847 | DUSP6 | CGUUCUACCUGGAAGAUGA | NM_022652 |
| 1848 | DUSP6 | GCAGCUUCAUUGAGAGAGA | NM_001946 |
| 1849 | DUSP6 | GGGAAAGACACCAAAUCAU | NM_022652 |
| 1850 | DUSP6 | UCGGAUCACUGGAGCCAAA | NM_001946 |
| 1851 | DUSP6 | AGAUACAGGCAGUAGGUUU | NM_022652 |
| 1852 | DUSP6 | GCAGGAGAGUUUAAAUACA | NM_001946 |
| 1853 | DUSP6 | UGACAGUGUUUGUUUGAAU | NM_022652 |
| 1854 | DUSP6 | UGGCUUACCUUAUGCAGAA | NM_022652 |
| 1855 | DUSP6 | CCGACACAGUGGUGCUCUA | NM_001946 |
| 1856 | DUSP6 | GGUAGGAGCAUGUGUUCUU | NM_001946 |
| 1857 | DUSP6 | ACUUCAACUUCAUGGGUCA | NM_001946 |
| 1858 | DUSP6 | GAGGAGCCAAAGAGAGAUU | NM_001946 |
| 1859 | DUSP6 | UGAGAGAGAUUCAUUGACA | NM_022652 |
| 1860 | DUSP6 | AAAGGGAGAAAGAGCAGUA | NM_022652 |
| 1861 | DUSP6 | CUUCCAACCAGAAUGUAUA | NM_022652 |
| 1862 | DUSP6 | GAUUAGAAGCCGCUAGACU | NM_022652 |
| 1863 | DUSP6 | AGAGAGAACCUCCGGCUUU | NM_022652 |
| 1864 | DUSP6 | GAAAUGGCGAUCAGCAAGA | NM_001946 |
| 1865 | DUSP6 | CAGUAUGCCACUUCUUAAA | NM_001946 |
| 1866 | DUSP7 | AAGUAUGGCAUCAAGUAUA | NM_001947 |
| 1867 | DUSP7 | ACGACUUUGUCAAGAGGAA | NM_001947 |
| 1868 | DUSP7 | CUAAGCAGCCCGUGCGACA | NM_001947 |
| 1869 | DUSP7 | GCAAGUAUGGCAUCAAGUA | NM_001947 |
| 1870 | DUSP7 | CAGCAGUGCCACCGAGUCA | NM_001947 |
| 1871 | DUSP7 | GCGCCAAGGACUCCACCAA | NM_001947 |
| 1872 | DUSP7 | GCAUCAAGUAUAUCCUCAA | NM_001947 |
| 1873 | DUSP7 | CGACUUUGUCAAGAGGAAA | NM_001947 |
| 1874 | DUSP7 | AGUAUGGCAUCAAGUAUAU | NM_001947 |
| 1875 | DUSP7 | AGAUGAACCUGUCACUCAA | NM_001947 |
| 1876 | DUSP7 | GGUUUCAACAAGUUUCAAA | NM_001947 |
| 1877 | DUSP7 | GGACGUGCUCGGCAAGUAU | NM_001947 |
| 1878 | DUSP7 | CAAGUAUGGCAUCAAGUAU | NM_001947 |
| 1879 | DUSP7 | AAGUAUAUCCUCAAUGUCA | NM_001947 |
| 1880 | DUSP7 | AAGAUGAACCUGUCACUCA | NM_001947 |
| 1881 | DUSP7 | CAUCAGCUUCAUUGACGAA | NM_001947 |
| 1882 | DUSP7 | CCUCCAAGGUGGUUUCAAC | NM_001947 |
| 1883 | DUSP7 | GCGGCGAGUUCACCUACAA | NM_001947 |
| 1884 | DUSP7 | CAACGACGCCUACGACUUU | NM_001947 |
| 1885 | DUSP7 | CAUCAAGUAUAUCCUCAAU | NM_001947 |
| 1886 | DUSP7 | UCAACGACGCCUACGACUU | NM_001947 |
| 1887 | DUSP7 | UCAAGUAUAUCCUCAAUGU | NM_001947 |
| 1888 | DUSP7 | CAAGGUGGUUUCAACAAGU | NM_001947 |
| 1889 | DUSP7 | GGCAUCAGCCGCUCAGUGA | NM_001947 |
| 1890 | DUSP7 | UGGACGUGCUCGGCAAGUA | NM_001947 |
| 1891 | DUSP7 | CCACCAACCACAACCUGUU | NM_001947 |
| 1892 | DUSP7 | CCACCGUGCUGCUCUACGA | NM_001947 |
| 1893 | DUSP7 | GCAGAAGAUGAACCUGUCA | NM_001947 |
| 1894 | DUSP7 | CCAAGGUGGUUUCAACAAG | NM_001947 |
| 1895 | DUSP7 | GCCAGAACCUCUCCCAGUU | NM_001947 |
| 1896 | DUSP8 | GGAAGGUGAUGGAUGCCAA | NM_004420 |
| 1897 | DUSP8 | CCUACAGGUUCGUGAAGGA | NM_004420 |
| 1898 | DUSP8 | GGGUGGUCCUCGAGCUCUA | NM_004420 |
| 1899 | DUSP8 | CAGCCAGGCCCGUUAUAAA | NM_004420 |
| 1900 | DUSP8 | CACAGGACGUGGUGGUCUA | NM_004420 |
| 1901 | DUSP8 | AGGAAACACUGCUGACCUU | NM_004420 |
| 1902 | DUSP8 | AACGACAACUACUGUGAAA | NM_004420 |
| 1903 | DUSP8 | GAGCGCUGCCACAGGGAAU | NM_004420 |
| 1904 | DUSP8 | CAUACGUUUCUAAGCAAUA | NM_004420 |
| 1905 | DUSP8 | GAAUAAGCUACGUCCUCAA | NM_004420 |
| 1906 | DUSP8 | CAAAGAAAGGUAAAUGGUU | NM_004420 |
| 1907 | DUSP8 | UGGAGUUCGAGGAGGGCAU | NM_004420 |
| 1908 | DUSP8 | UGCAAAGGCUGCCGAGCUU | NM_004420 |
| 1909 | DUSP8 | GCAAAGAAAGGUAAAUGGU | NM_004420 |
| 1910 | DUSP8 | GCAAUGAUUUGGCAACAGU | NM_004420 |
| 1911 | DUSP8 | CUAAACAAGGAUCUGAUGA | NM_004420 |
| 1912 | DUSP8 | AGGACGUGGUGGUCUAUGA | NM_004420 |
| 1913 | DUSP8 | GGUGAUGGAUGCCAAGAAG | NM_004420 |
| 1914 | DUSP8 | ACAAGUCCAUCGAGUUCAU | NM_004420 |
| 1915 | DUSP8 | GCAGCUGCCAGAUGGAGUU | NM_004420 |
| 1916 | DUSP8 | GCUGCCAGAUGGAGUUCGA | NM_004420 |
| 1917 | DUSP8 | AACAUACGUUUCUAAGCAA | NM_004420 |
| 1918 | DUSP8 | UCAACGACAACUACUGUGA | NM_004420 |
| 1919 | DUSP8 | UGUCUGGUAUUUAAACUGA | NM_004420 |
| 1920 | DUSP8 | UAAACAAGGAUCUGAUGAC | NM_004420 |
| 1921 | DUSP8 | CAACGACAACUACUGUGAA | NM_004420 |
| 1922 | DUSP8 | GCCGAGCUUUCGUGCACUU | NM_004420 |
| 1923 | DUSP8 | GCAGCCAGGCCCGUUAUAA | NM_004420 |
| 1924 | DUSP8 | GGAAACACUGCUGACCUUU | NM_004420 |
| 1925 | DUSP8 | GUGCUCAGCUCCGUCAACA | NM_004420 |
| 1926 | DUSP9 | CGAGAAGAAUGGUGACUUU | NM_001395 |
| 1927 | DUSP9 | GGGCCAAGCUGCAGACACA | NM_001395 |
| 1928 | DUSP9 | AGGAAGAAGUCUAACAUCU | NM_001395 |
| 1929 | DUSP9 | GAUCUAUGCUUGUUUGUUU | NM_001395 |
| 1930 | DUSP9 | GUCAAGAGGAAGAAGUCUA | NM_001395 |
| 1931 | DUSP9 | UGGCCUACCUCAUGCAGAA | NM_001395 |
| 1932 | DUSP9 | CCUGGAGCCUGGAGAGGAU | NM_001395 |
| 1933 | DUSP9 | UCAAGAGGAAGAAGUCUAA | NM_001395 |
| 1934 | DUSP9 | CGACUGCUCUGAUGCGGAA | NM_001395 |
| 1935 | DUSP9 | CAGGGAGGCUUCAGCAGAU | NM_001395 |
| 1936 | DUSP9 | AAGAAGAAGGCCUCACUUU | NM_001395 |
| 1937 | DUSP9 | AGAAGAAGGCCUCACUUUU | NM_001395 |
| 1938 | DUSP9 | GCAGACACACACAGUCAUU | NM_001395 |
| 1939 | DUSP9 | GAGUGAGGGUGGCCAAACU | NM_001395 |
| 1940 | DUSP9 | GGGCUGCCGUCCUAAUCAA | NM_001395 |
| 1941 | DUSP9 | GGAAGAAGUCUAACAUCUC | NM_001395 |
| 1942 | DUSP9 | GGAGAGGAUCUAUGCUUGU | NM_001395 |
| 1943 | DUSP9 | AGAAGAAUGGUGACUUUCA | NM_001395 |
| 1944 | DUSP9 | GGCAGUUGCUGGACUUUGA | NM_001395 |
| 1945 | DUSP9 | AGACACACACAGUCAUUCA | NM_001395 |
| 1946 | DUSP9 | AGAGGAAGAAGUCUAACAU | NM_001395 |
| 1947 | DUSP9 | GGAAGAAGAAGGCCUCACU | NM_001395 |
| 1948 | DUSP9 | CUGGUGGGCUGUUUUGUUU | NM_001395 |
| 1949 | DUSP9 | UGGAGAGCCUGGCCAAACU | NM_001395 |
| 1950 | DUSP9 | GGAGAGGCGUUUGCCAUCA | NM_001395 |
| 1951 | DUSP9 | GAAGAAGGCCUCACUUUUG | NM_001395 |
| 1952 | DUSP9 | CCACCUCGUUGCACUGGAU | NM_001395 |
| 1953 | DUSP9 | GAGGAAGAAGUCUAACAUC | NM_001395 |
| 1954 | DUSP9 | AAACUGGGCAUCCGCUACA | NM_001395 |
| 1955 | DUSP9 | CACACACAGUCAUUCAUUU | NM_001395 |
| 1956 | DUT | GGAGAAAGCUGUUGUGAAA | NM_001948 |
| 1957 | DUT | GAUGAAGAUUAUAGAGGAA | NM_001948 |
| 1958 | DUT | CCUCAGUGAAGUAGCAAUA | NM_001948 |
| 1959 | DUT | GGUACAAAAUCUUGCAUAA | NM_001948 |
| 1960 | DUT | GGACUGAUUCUGUGGCUUA | NM_001948 |
| 1961 | DUT | UGUAGGAGCUGGUGUCAUA | NM_001948 |
| 1962 | DUT | AGGAAAUGUUGGUGUUGUA | NM_001948 |
| 1963 | DUT | GCAAAUUGUACUAGUUGUA | NM_001948 |
| 1964 | DUT | UUGCAUAAGCUGAACUAAA | NM_001948 |
| 1965 | DUT | GAGGUAUGUUUGUGAAAGA | NM_001948 |
| 1966 | DUT | AAGGAGAGAUUAAAGGUAU | NM_001948 |
| 1967 | DUT | CAGAAAUAGAAGAAGUUCA | NM_001948 |
| 1968 | DUT | GGUCAGGCUUGGCUGCAAA | NM_001948 |
| 1969 | DUT | CAGAAAACAAGAAGUCAUA | NM_001948 |
| 1970 | DUT | GCUCAUUUGCGAACGGAUU | NM_001948 |
| 1971 | DUT | UGGAGAAAGCUGUUGUGAA | NM_001948 |
| 1972 | DUT | UAGAAGAAGUUCAAGCCUU | NM_001948 |
| 1973 | DUT | GGUUUGUUCCCUUGAAUUU | NM_001948 |
| 1974 | DUT | AGAUGAAGAUUAUAGAGGA | NM_001948 |
| 1975 | DUT | GAUAAAUCCUCUAUUGACU | NM_001948 |
| 1976 | DUT | GAAAACGGACAUUCAGAUA | NM_001948 |
| 1977 | DUT | UGGCUUACCUUGAUUAACA | NM_001948 |
| 1978 | DUT | CAAUACCACCUAUGGAGAA | NM_001948 |
| 1979 | DUT | CAUCAGGCAAAUUGUACUA | NM_001948 |
| 1980 | DUT | UGUACAGUGCCUAUGAUUA | NM_001948 |
| 1981 | DUT | UAGAGGAAAUGUUGGUGUU | NM_001948 |
| 1982 | DUT | CAUACCAGGUUGGGCUAUA | NM_001948 |
| 1983 | DUT | CCUUCUGGGUGUUAUGGAA | NM_001948 |
| 1984 | DUT | CUUUAUUGAUGUAGGAGCU | NM_001948 |
| 1985 | DUT | AAAGGAGAGAUUAAAGGUA | NM_001948 |
| 1986 | ENPP1 | CUAACAAGCUGUAAAGAUA | NM_006208 |
| 1987 | ENPP1 | GAUCAGAUGUGGAAAUUAA | NM_006208 |
| 1988 | ENPP1 | CCUCAUGGGUUGAAGAAUU | NM_006208 |
| 1989 | ENPP1 | AGAAAGAAAUGGUGUCAAU | NM_006208 |
| 1990 | ENPP1 | GAAAGGAAAUAUUGUGGAA | NM_006208 |
| 1991 | ENPP1 | CCAUAGAACCAGAACAUAU | NM_006208 |
| 1992 | ENPP1 | GCGAAAGUAUGCUGAAGAA | NM_006208 |
| 1993 | ENPP1 | GAGAAAAGGUUGACCAGAA | NM_006208 |
| 1994 | ENPP1 | AUUCAGGUGUGGUGAGAAA | NM_006208 |
| 1995 | ENPP1 | CUACAAAUAUAGUGCCAAU | NM_006208 |
| 1996 | ENPP1 | ACAAGAAACCCCAGAGAUA | NM_006208 |
| 1997 | ENPP1 | GUACAAAGGAGAACCAAUU | NM_006208 |
| 1998 | ENPP1 | UUAGAGAAUCUGAGGCAAA | NM_006208 |
| 1999 | ENPP1 | GCAGAAGAGAAGAUUAUUA | NM_006208 |
| 2000 | ENPP1 | GCAUUGAAUCCCUCAGAAA | NM_006208 |
| 2001 | ENPP1 | GUGCAUAGAACCAGAACAU | NM_006208 |
| 2002 | ENPP1 | GCUGAUGGAUGGUCUGAAA | NM_006208 |
| 2003 | ENPP1 | GAAUUGAGCCCUUGACAUU | NM_006208 |
| 2004 | ENPP1 | UGGCAGAAGAGAAGAUUAU | NM_006208 |
| 2005 | ENPP1 | CCUAUACCGUGGACAGAAA | NM_006208 |
| 2006 | ENPP1 | GAACCAUGUGAGAGCAUUA | NM_006208 |
| 2007 | ENPP1 | CGUCAGUGGUCCUGUGUUU | NM_006208 |
| 2008 | ENPP1 | UUAAAGUGGUUCUGGAUAU | NM_006208 |
| 2009 | ENPP1 | AAAGAAGAGUCAUCCGUAA | NM_006208 |
| 2010 | ENPP1 | GAAACCAAGCUGUGCCAAA | NM_006208 |
| 2011 | ENPP1 | GCAUGAAACUUUACCCUAU | NM_006208 |
| 2012 | ENPP1 | GUGACUAUCUUUAUGAGAA | NM_006208 |
| 2013 | ENPP1 | CAUAGAACCAGAACAUAUA | NM_006208 |
| 2014 | ENPP1 | GGCAAACAGUAGACUUAUA | NM_006208 |
| 2015 | ENPP1 | UGGCAUAAUCGACAAUAAA | NM_006208 |
| 2016 | ENPP2 | GAGUAGAGCUUGUAAUAAA | NM_006209 |
| 2017 | ENPP2 | GAAAGUGGUUAUAGUGAAA | NM_006209 |
| 2018 | ENPP2 | AUGAUAAGGUAGAGCCAAA | NM_006209 |
| 2019 | ENPP2 | ACAGAAGAAUUGAGGAUAU | NM_006209 |
| 2020 | ENPP2 | AGGUAGAGCCAAAGAACAA | NM_006209 |
| 2021 | ENPP2 | GCUCAGAGGACGAAUCAAA | NM_006209 |
| 2022 | ENPP2 | AGACAUACCUGCAUACAUA | NM_006209 |
| 2023 | ENPP2 | AGGAAGAAUUCGAUCCAAA | NM_006209 |
| 2024 | ENPP2 | CCUAAGAGGAGACAGGAAA | NM_006209 |
| 2025 | ENPP2 | ACUAAUACCUUCAGGCCAA | NM_006209 |
| 2026 | ENPP2 | CAACAGAAGAAUUGAGGAU | NM_006209 |
| 2027 | ENPP2 | GGAAAGAAAUGGAGUUAAC | NM_006209 |
| 2028 | ENPP2 | GCAGCAAAGUCAUGCCUAA | NM_006209 |
| 2029 | ENPP2 | CAUAUGAGAGCGAGAUUUA | NM_006209 |
| 2030 | ENPP2 | GGUCAACCGCUAUGGAUUA | NM_006209 |
| 2031 | ENPP2 | UAGAAGAACUCAUGAAGAU | NM_006209 |
| 2032 | ENPP2 | AUUAAUGGAUGGACUGAAA | NM_006209 |
| 2033 | ENPP2 | GGUUAUGGCCCAACAUUUA | NM_006209 |
| 2034 | ENPP2 | GGAAAUAAAGGCCGCAGAA | NM_006209 |
| 2035 | ENPP2 | CCAAAGAAAAGAAGAAGAA | NM_006209 |
| 2036 | ENPP2 | CUAAGAGACCUAAGAGGAA | NM_006209 |
| 2037 | ENPP2 | GCCUGGAACUCUAGGAAGA | NM_006209 |
| 2038 | ENPP2 | AUAAGAAACCAUCAGGAAA | NM_006209 |
| 2039 | ENPP2 | CAAAGAACAAGUUGGAUGA | NM_006209 |
| 2040 | ENPP2 | CGAGAGUAGUUAUGGCUCA | NM_006209 |
| 2041 | ENPP2 | GGUGAAAGCUGGAACAUUC | NM_006209 |
| 2042 | ENPP2 | UCUGCGAGGGCGAGAGAAA | NM_006209 |
| 2043 | ENPP2 | AAGAAAUAUGCUUCGGAAA | NM_006209 |
| 2044 | ENPP2 | CCUCACGAGCGGAGAAUAU | NM_006209 |
| 2045 | ENPP2 | CUGAGUAGAGCUUGUAAUA | NM_006209 |
| 2046 | ENPP3 | GAUCAGAAGUGGCUAUAAA | NM_005021 |
| 2047 | ENPP3 | CGAAUAUGGAUGUGCAAUA | NM_005021 |
| 2048 | ENPP3 | CUGAGGAAAUUGUUAGAAA | NM_005021 |
| 2049 | ENPP3 | GGUGAUUGCUGCUGGGAUU | NM_005021 |
| 2050 | ENPP3 | GAUCAUGUCACUUGGAUUA | NM_005021 |
| 2051 | ENPP3 | CCUCAUGGCUGGAAGAAAA | NM_005021 |
| 2052 | ENPP3 | GGAAUAUGUCAGUGGAUUU | NM_005021 |
| 2053 | ENPP3 | CAGAGUAAUUAAAGCCUUA | NM_005021 |
| 2054 | ENPP3 | GCACAUGGACCCAGUUUUA | NM_005021 |
| 2055 | ENPP3 | CAGCAACAGUGAAAGUAAA | NM_005021 |
| 2056 | ENPP3 | AAUUAAAGCCUUACAGGUA | NM_005021 |
| 2057 | ENPP3 | GCUGAAAGACCCAGGUUUU | NM_005021 |
| 2058 | ENPP3 | GAGCUGUCCUGAAGGUAAA | NM_005021 |
| 2059 | ENPP3 | AUGCAGAGGAGGUGUCAAA | NM_005021 |
| 2060 | ENPP3 | CAUCCGAGCUCAUAAUAUA | NM_005021 |
| 2061 | ENPP3 | GGAUGGAUUUAGAGCUGAA | NM_005021 |
| 2062 | ENPP3 | GGUAGUAGAUCAUGCUUUU | NM_005021 |
| 2063 | ENPP3 | UCAAAAUACAUGAGAGCUA | NM_005021 |
| 2064 | ENPP3 | AAUAACAGCAACAGUGAAA | NM_005021 |
| 2065 | ENPP3 | ACAGAAAGAAAUGGAGUAA | NM_005021 |
| 2066 | ENPP3 | CCACAGUGUUCUUCUUAUA | NM_005021 |
| 2067 | ENPP3 | AGAGAAGACUGAAGUUGAA | NM_005021 |
| 2068 | ENPP3 | AGUCAGUGCCAGAGUAAUU | NM_005021 |
| 2069 | ENPP3 | GUAACAAGAUGGAAUACAU | NM_005021 |
| 2070 | ENPP3 | CUAUAAGAGUGUUUGCCAA | NM_005021 |
| 2071 | ENPP3 | GAAUAUGGAUGUGCAAUAA | NM_005021 |
| 2072 | ENPP3 | UGGAAUACAUGACUGAUUA | NM_005021 |
| 2073 | ENPP3 | GGACCCAGUUUUAAAGAGA | NM_005021 |
| 2074 | ENPP3 | AGAAGAAAUAACAGCAACA | NM_005021 |
| 2075 | ENPP3 | CAAGAAGAAAUAACAGCAA | NM_005021 |
| 2076 | ENPP4 | GAACAGAGGUUUAUAACAA | NM_014936 |
| 2077 | ENPP4 | GAAACUAGGUUGUGACAGA | NM_014936 |
| 2078 | ENPP4 | GCACACAGAUCUCAGGAAA | NM_014936 |
| 2079 | ENPP4 | GGUCAUAAGUUAACUGUAU | NM_014936 |
| 2080 | ENPP4 | AGACAAAGAACUUAGACUA | NM_014936 |
| 2081 | ENPP4 | CUGAUUAUCUGAAGAACUA | NM_014936 |
| 2082 | ENPP4 | AGGAAUGGCAUAAGAAUUU | NM_014936 |
| 2083 | ENPP4 | AUACGGACCUGAAGAUAAA | NM_014936 |
| 2084 | ENPP4 | GCUCUGUGAUGGUAAAUAA | NM_014936 |
| 2085 | ENPP4 | GCUUAAUGCCUUUAUGUAA | NM_014936 |
| 2086 | ENPP4 | CCAAUCAGCUUCAGGAAAA | NM_014936 |
| 2087 | ENPP4 | GGACAAUUGUGCUAAAUGA | NM_014936 |
| 2088 | ENPP4 | GAUUAUCUGUGAUGGUAAA | NM_014936 |
| 2089 | ENPP4 | GGACCUGAAGAUAAAGAAA | NM_014936 |
| 2090 | ENPP4 | CAUCAAUCCUAACUAGAAA | NM_014936 |
| 2091 | ENPP4 | GGUAGGAAAUCAUUAGGUA | NM_014936 |
| 2092 | ENPP4 | CACAAAGGCUACAAGCAUA | NM_014936 |
| 2093 | ENPP4 | UGAAGAAAGCCAUGGCAUU | NM_014936 |
| 2094 | ENPP4 | ACUCAAGAUGUUAGGGCUA | XM_376503 |
| 2095 | ENPP4 | GAUUGGUGGUUAUGAGUUU | NM_014936 |
| 2096 | ENPP4 | CAAGAAGAUGAUGAUGAUN | NM_014936 |
| 2097 | ENPP4 | CUAACAUGCCUCAUAAUAA | NM_014936 |
| 2098 | ENPP4 | AUGUUAGGGCUAUGGGAAA | XM_376503 |
| 2099 | ENPP4 | CCACAAAUACGGACCUGAA | NM_014936 |
| 2100 | ENPP4 | GGAAUGAGGCAGUACCUAU | NM_014936 |
| 2101 | ENPP4 | UAUGUUAAGUGGCAGAAUA | NM_014936 |
| 2102 | ENPP4 | GAAAUAAUCCCUCUGUUUA | NM_014936 |
| 2103 | ENPP4 | AGAAAUAAUCCCUCUGUUU | NM_014936 |
| 2104 | ENPP4 | UCAAAGAAGACAUUCCUAA | NM_014936 |
| 2105 | ENPP4 | CAAAUAGCAUUGACACAUU | NM_014936 |
| 2106 | ENPP5 | UGAAAUAGCUCAACCAUUA | NM_021572 |
| 2107 | ENPP5 | GGAAUAAAGAUGUGAGAGU | NM_021572 |
| 2108 | ENPP5 | AGAUAUGCAUGCUGAAAUA | NM_021572 |
| 2109 | ENPP5 | GGUGAUAAGUGUUGAAAAU | NM_021572 |
| 2110 | ENPP5 | GGAAGAAGCGACACCAAUA | NM_021572 |
| 2111 | ENPP5 | CCUUAUACACAGAGUACUA | NM_021572 |
| 2112 | ENPP5 | GGGAAGACCCUGAUGACAU | NM_021572 |
| 2113 | ENPP5 | GUGUUAAACCAGCAGAAUA | NM_021572 |
| 2114 | ENPP5 | UAAUAGAACUUGACCAGUA | NM_021572 |
| 2115 | ENPP5 | UGACAAGAAGUUAGGAUAU | NM_021572 |
| 2116 | ENPP5 | UGUUAAACCAGCAGAAUAU | NM_021572 |
| 2117 | ENPP5 | GAAUAAAGAUGUGAGAGUA | NM_021572 |
| 2118 | ENPP5 | UAGAUAAGAUCCUGCUUUA | NM_021572 |
| 2119 | ENPP5 | AAGGCAAAGUUGUGGAACA | NM_021572 |
| 2120 | ENPPS | GAGAAGAAGAAGGUGAUAA | NM_021572 |
| 2121 | ENPP5 | GAGGAAAGGUUAAUAGAAC | NM_021572 |
| 2122 | ENPP5 | GCAUAGGGAUAGAUAAGAU | NM_021572 |
| 2123 | ENPP5 | GCCCAUAAAUCUUGGUCUU | NM_021572 |
| 2124 | ENPP5 | GGAAAGGUUAAUAGAACUU | NM_021572 |
| 2125 | ENPP5 | CAACUUUGCACUAUGUAAA | NM_021572 |
| 2126 | ENPP5 | GGCACAUUUUACAGAAUAA | NM_021572 |
| 2127 | ENPP5 | GGUCCUGCCUUCAGAAAGA | NM_021572 |
| 2128 | ENPP5 | CGAUAAUGCGUUAGCAGAU | NM_021572 |
| 2129 | ENPP5 | CGGUUACGAUAAUGCGUUA | NM_021572 |
| 2130 | ENPP5 | CCAGAAAGGUGGCAUUACA | NM_021572 |
| 2131 | ENPP5 | GCCAUGAACUCCACAGAUU | NM_021572 |
| 2132 | ENPP5 | ACACUGAACUGAUCAAGUA | NM_021572 |
| 2133 | ENPP5 | AGAAGAAGGUGAUAAGUGU | NM_021572 |
| 2134 | ENPP5 | UGAAGAUAGAGUUGCCAAA | NM_021572 |
| 2135 | ENPP5 | CAGCAGAAUAUGACCAAGA | NM_021572 |
| 2136 | ENPP6 | GGAAACACUCUGAGAUAUA | NM_153343 |
| 2137 | ENPP6 | UGGGAAACACUCUGAGAUA | NM_153343 |
| 2138 | ENPP6 | ACAAAGUGAUUGAGCUGAA | NM_153343 |
| 2139 | ENPP6 | CCAUAUACCAUGAGCGCAU | NM_153343 |
| 2140 | ENPP6 | CAACAAGUCCUUUGACAUU | NM_153343 |
| 2141 | ENPP6 | CCUCAAGGCUGUAGACACU | NM_153343 |
| 2142 | ENPP6 | ACAACGAGCUCAUGGACAU | NM_153343 |
| 2143 | ENPP6 | GGAUAUCAAUUUUGCCAAU | NM_153343 |
| 2144 | ENPP6 | CCUACUGCCUAGAAUAUAA | NM_153343 |
| 2145 | ENPP6 | GCAUUGACGUGGAAGGCCA | NM_153343 |
| 2146 | ENPP6 | GGACAAAGUGAUUGAGCUG | NM_153343 |
| 2147 | EPM2A | GAAGUUAAAUUGAGGCUUA | NM_005670 |
| 2148 | EPM2A | GCCAAAGAAUCUAGGAAAU | NM_005670 |
| 2149 | EPM2A | CAAGAAGGAUACAAGGUAA | NM_005670 |
| 2150 | EPM2A | CCACAAACACAUAUUGAUA | NM_005670 |
| 2151 | EPM2A | CCAAAUAUCUGGCUGGGUA | NM_005670 |
| 2152 | EPM2A | CCAUCAAACUGAAGCAUGA | NM_005670 |
| 2153 | EPM2A | GGAAAUACAGAGAUGAACA | NM_005670 |
| 2154 | EPM2A | AGAAGAAAGAGAAGUGUUU | NM_005670 |
| 2155 | EPM2A | GUCAUAAUGUGUUGUGAAA | NM_005670 |
| 2156 | EPM2A | CAAAAUCAGUUUAGGACUA | NM_005670 |
| 2157 | EPM2A | GGACACAUUUCCACUAUAA | NM_005670 |
| 2158 | EPM2A | GAAAUACAGAGAUGAACAA | NM_005670 |
| 2159 | EPM2A | GAUUCUACCUGAACUGAAA | NM_005670 |
| 2160 | EPM2A | CAAUAUGCCUGCAGGAGUU | NM_005670 |
| 2161 | EPM2A | CCAACAACCCUGUGUAACA | NM_005670 |
| 2162 | EPM2A | UGAGGAAGGUGCAGUAUUU | NM_005670 |
| 2163 | EPM2A | CCAAAGAAUCUAGGAAAUU | NM_005670 |
| 2164 | EPM2A | GAUUGGACCAUGAAUGAUA | NM_005670 |
| 2165 | EPM2A | CAAGAAAGCUGUGGCUCAA | NM_005670 |
| 2166 | EPM2A | CACAAUAUCCAAUGAAGAA | NM_005670 |
| 2167 | EPM2A | AGACGAGGCCUUUGCUUUA | NM_005670 |
| 2168 | EPM2A | UCUAAGAAAUCCAGCUUCA | NM_005670 |
| 2169 | EPM2A | CAUCAUGACCGUUGCUGUA | NM_005670 |
| 2170 | EPM2A | AUACAGAGAUGAACAACUU | NM_005670 |
| 2171 | EPM2A | UGUGCAAGGUGAUAUAUAA | NM_005670 |
| 2172 | EPM2A | GGUCAGAAGGGUUAACUCA | NM_005670 |
| 2173 | EPM2A | GGGAUAUUGUACAGAAUUC | NM_005670 |
| 2174 | EPM2A | ACAAGAAGGAUACAAGGUA | NM_005670 |
| 2175 | EPM2A | UGGGAUGACUUUCGAUUAU | NM_005670 |
| 2176 | EPM2A | CAGUUAGGCUUGUACAUCA | NM_005670 |
| 2177 | EYA1 | CGAAGUAGUUGAAGAGCUA | NM_000503 |
| 2178 | EYA1 | GCGCAAAGCUGUUACCAAA | NM_000503 |
| 2179 | EYA1 | GGACAAACUGUGUGAAUAU | NM_172059 |
| 2180 | EVA1 | AGACAAUCAUGUACAGAAA | NM_172060 |
| 2181 | EVA1 | GAAAAUAAGCCAUGAGAAU | NM_000503 |
| 2182 | EYA1 | CCAAUGAGCAGCAGUGAAA | NM_172058 |
| 2183 | EYA1 | AGGAGAUGGUGUAGAAGAA | NM_000503 |
| 2184 | EYA1 | GCAACAAGCUACAGCCUAU | NM_172059 |
| 2185 | EYA1 | GGAAAUAAUUCACUCACAA | NM_172059 |
| 2186 | EYA1 | GAAAUUACCCUUAGGAUGA | NM_172059 |
| 2187 | EYA1 | CCACAAAGAAUAUAGAUGA | NM_172059 |
| 2188 | EVA1 | GAAUACCAGUGGAGGAAUU | NM_000503 |
| 2189 | EYA1 | GGUCCUACGCCAACAGAUA | NM_172058 |
| 2190 | EYA1 | UGAAGAGACAAUAGCAUUA | NM_172059 |
| 2191 | EYA1 | CCAUAAGAGUUUCUCCAAA | NM_000503 |
| 2192 | EYA1 | CGGACAAACUGUGUGAAUA | NM_172058 |
| 2193 | EYA1 | GGACAGGACCUAAGCACAU | NM_172059 |
| 2194 | EYA1 | GGGACUUGGAUGAGACAAU | NM_172059 |
| 2195 | EYA1 | UGUCAGACCAUAAGAGUUU | NM_172058 |
| 2196 | EYA1 | AAAGAAAGCUGUUUUGAGA | NM_172060 |
| 2197 | EYA1 | AGAAAGCUGUUUUGAGAGA | NM_000503 |
| 2198 | EYA1 | CAUCAAGACUGAAGGUGGA | NM_172059 |
| 2199 | EYA1 | GAAGCAAACAGUUGACAAU | NM_000503 |
| 2200 | EYA1 | UGUUAUAGGAGAUGGUGUA | NM_172059 |
| 2201 | EYA1 | GGGCAGGCAUCAAGACUGA | NM_172058 |
| 2202 | EYA1 | AGAAGAACAAGGAGCAAAA | NM_000503 |
| 2203 | EYA1 | GACAGGAUUUCUCAGCUA | NM_172058 |
| 2204 | EYA1 | UAUAGGAGAUGGUGUAGAA | NM_172060 |
| 2205 | EYA1 | UGGUGUAGAAGAAGAACAA | NM_172059 |
| 2206 | EYA1 | GCAUGGAUGUCAAGUGUCA | NM_172058 |
| 2207 | EYA2 | ACGUCAGAGGUUAUMGCAA | NM_172113 |
| 2208 | EYA2 | UGACAAUGGCCAAGAUUUA | NM_172112 |
| 2209 | EYA2 | AGGAUGAGGUACAAGGAAA | NM_172113 |
| 2210 | EYA2 | GGAAUCAGAUAUUGGACAA | NM_172113 |
| 2211 | EYA2 | GGACAGUGCACGUGCCUUA | NM_172111 |
| 2212 | EYA2 | GAAAGCUGCAGGAGGGAAA | NM_172113 |
| 2213 | EYA2 | GAGAACAUCUACAGUGCAA | NM_172111 |
| 2214 | EYA2 | CGAAAGAGGGAGACACAGA | NM_005244 |
| 2215 | EYA2 | GUGAAGGAGAUGUACAAUA | NM_172110 |
| 2216 | EYA2 | UGGCCAAAGUCCUGCUAUA | NM_005244 |
| 2217 | EYA2 | GGGUGAAGGAGAUGUACAA | NM_172112 |
| 2218 | EYA2 | GUUCACAGUUCUAAUGUAA | NM_172112 |
| 2219 | EYA2 | GUGUCUACCUGGAAUGAAA | NM_172112 |
| 2220 | EYA2 | CCUCAAACCACAAUAGGAA | NM_172112 |
| 2221 | EYA2 | GAGGAAAUGGACUGGGCAA | NM_172111 |
| 2222 | EYA2 | GGACAUUUGCAUCCAGAUA | NM_172110 |
| 2223 | EYA2 | CAACAUUGGCUUCGGAGUA | NM_172111 |
| 2224 | EYA2 | GGUACAAGGAAAUGGUAGA | NM_172113 |
| 2225 | EYA2 | CAAGGAAAUGGUAGAACUA | NM_005244 |
| 2226 | EYA2 | AGAAUAAGCUGGUCUCCAA | NM_172111 |
| 2227 | EYA2 | AGAGGAUAAUGCAGAGAUU | NM_005244 |
| 2228 | EYA2 | CAGCACAAGCCUAUGGAAU | NM_005244 |
| 2229 | EYA2 | CAUCGGUGAUGGUGUGGAA | NM_005244 |
| 2230 | EYA2 | GGUGCUUUGUGAUGGAUAA | NM_005244 |
| 2231 | EYA2 | GAAGACAGCUUGAACCAUU | NM_005244 |
| 2232 | EYA2 | GAAUGAAACGAAUGGUACA | NM_172112 |
| 2233 | EYA2 | GGAGUGUGCACCAGGACUA | NM_172110 |
| 2234 | EYA2 | ACGCAGACCUGGAGGCACU | NM_172111 |
| 2235 | EYA2 | GGCCAAGAUUUAAGCACAU | NM_172111 |
| 2236 | EYA3 | GGAAGAAGAGCAAGAUUUA | NM_172098 |
| 2237 | EYA3 | CAGAAAGAAUUGUGUGAAU | NM_172098 |
| 2238 | EYA3 | GAGCAGAAAUUGAAGUUUU | NM_001990 |
| 2239 | EYA3 | GAGAUUAAGAGCAGAAAUU | NM_001990 |
| 2240 | EYA3 | UGAAGAAAUUGCAGCCAAA | NM_001990 |
| 2241 | EYA3 | GAUCCUAUGCCCAGAAAUA | NM_172098 |
| 2242 | EYA3 | GCAGGAAUCAGGAGAGCAA | NM_001990 |
| 2243 | EYA3 | UCAAUGACUUAGAGACAUA | NM_172098 |
| 2244 | EYA3 | GAGAACAUCUAUAGUGCUA | NM_001990 |
| 2245 | EYA3 | CCACAUACCAGUCGGAGAA | NM_172098 |
| 2246 | EYA3 | AGGAAGCACUGCAGAGAUU | NM_172098 |
| 2247 | EYA3 | UGGACGAGAUGAAGAAAUU | NM_001990 |
| 2248 | EYA3 | GUGAAGAAUUUGACCUGAA | NM_172098 |
| 2249 | EYA3 | GCAGAGAUUAAGAGCAGAA | NM_001990 |
| 2250 | EYA3 | GGAAAGUGAGAGAAAUCUA | NM_001990 |
| 2251 | EYA3 | GUCAAGGUUUGGAAAGAAA | NM_001990 |
| 2252 | EYA3 | UCACAAAUGUAUUCUGCAA | NM_172098 |
| 2253 | EYA3 | GCAAGAUUUACCAGAGCAA | NM_001990 |
| 2254 | EYA3 | AUAUGGACUAGGAGAAAUA | NM_001990 |
| 2255 | EYA3 | GAUUAAGAGCAGAAAUUGA | NM_001990 |
| 2256 | EYA3 | UGGAAGAAGAGCAAGAUUU | NM_001990 |
| 2257 | EYA3 | AGAGCAAACUAUAAGUCAA | NM_172098 |
| 2258 | EYA3 | GAUGAUCAGUCCAGGAAAA | NM_001990 |
| 2259 | EYA3 | AGUGAUUGGCUCAGGUUUA | NM_172098 |
| 2260 | EYA3 | CUAUAAGUCAAGUAAGCAA | NM_001990 |
| 2261 | EYA3 | UCACCAGGCUUUAGAGCUU | NM_001990 |
| 2262 | EYA3 | GGACCCAACAGUAGUGAUU | NM_172098 |
| 2263 | EYA3 | CCGGAAAGUGAGAGAAAUC | NM_001990 |
| 2264 | EYA3 | CUAUAUGGACUAGGAGAAA | NM_001990 |
| 2265 | EYA3 | GAGAAUUGUGUCAAGGUUU | NM_001990 |
| 2266 | EYA4 | GGGUCAAAGUCCAGAGGAA | NM_172103 |
| 2267 | EYA4 | GAGAAUAUUUACAGUGCAA | NM_004100 |
| 2268 | EYA4 | GGAAAGAGCUGCGGGAAAA | NM_172104 |
| 2269 | EYA4 | GGGCAGAGAUUGMGGUCU | NM_172103 |
| 2270 | EYA4 | GAGAGAACCUGUAGGAGUU | NM_172103 |
| 2271 | EYA4 | GCACUUAAGUCUUUAUCAA | NM_172105 |
| 2272 | EYA4 | GCGUAUAUGACAUCGAAUA | NM_172103 |
| 2273 | EYA4 | AGACAGCAUUUGUGUGUUA | NM_172105 |
| 2274 | EYA4 | GCAUAAAUGUCUUGGUAAC | NM_004100 |
| 2275 | EYA4 | GGGAAAUGGGAAUAUAAUA | NM_172103 |
| 2276 | EYA4 | UCUCAGAAUUCCAGGUCUA | NM_172105 |
| 2277 | EYA4 | GGUCUUAUGCACAGAAGUA | NM_172103 |
| 2278 | EYA4 | CGUAUAUGACAUCGAAUAA | NM_004100 |
| 2279 | EYA4 | GGGCAGGACUUAGGUGUAA | NM_172104 |
| 2280 | EYA4 | AGUUAAGGGCAGAGAUUGA | NM_172104 |
| 2281 | EYA4 | CAAAGAUCUUGAUGAGAGA | NM_172105 |
| 2282 | EYA4 | CCACCAAGCACUGGAAUUA | NM_172103 |
| 2283 | EYA4 | GGAAGGAACGAGAAUAAAU | NM_004100 |
| 2284 | EYA4 | GAAGGAACGAGAAUAAAUA | NM_172104 |
| 2285 | EYA4 | AUUAUUAGCACUAGGAGUA | NM_004100 |
| 2286 | EYA4 | GCACAGUAUUAUUCAGCAU | NM_004100 |
| 2287 | EYA4 | GGAAGUUGGCUUUUCGUUA | NM_172103 |
| 2288 | EYA4 | CAGAGGAAGAGGCCGGAAA | NM_172103 |
| 2289 | EYA4 | CUGACAGAUUCCUGGCUAA | NM_172103 |
| 2290 | EYA4 | CUGUAGGAGUUCUGGGUCA | NM_172105 |
| 2291 | EYA4 | GCACAUCAGUUACUACAAA | NM_172103 |
| 2292 | EYA4 | GGGAUGGUGUAGAAGAAGA | NM_004100 |
| 2293 | EYA4 | CUAUACAGCCUUUGGCCAA | NM_172104 |
| 2294 | EYA4 | GCAGAAAAGUAGUGUAUGU | NM_004100 |
| 2295 | EYA4 | AAGAAAACGUGCACAGAAU | NM_172105 |
| 2296 | FBP1 | GGACAAGGAUGUGAAGAUA | NM_000507 |
| 2297 | FBP1 | ACAAGGAUGUGAAGAUAAA | NM_000507 |
| 2298 | FBP1 | GGUAAAAUCUACAGCCUUA | NM_000507 |
| 2299 | FBP1 | GUAAAUAUGUGGUCUGUUU | NM_000507 |
| 2300 | FBP1 | CCACUGGUGUUAAGAUAUA | NM_000507 |
| 2301 | FBP1 | CUGAGUACAUCCAGAGGAA | NM_000507 |
| 2302 | FBP1 | CCUAGAGAGCAGAAAUAAA | NM_000507 |
| 2303 | FBP1 | GGAAGGAGGCCGUGUUAGA | NM_000507 |
| 2304 | FBP1 | GAGUACAUCCAGAGGAAGA | NM_000507 |
| 2305 | FBP1 | UGGCAUCUAUAGAAAGAAA | NM_000507 |
| 2306 | FBP1 | UGUCAGAAGAAGAUAAACA | NM_000507 |
| 2307 | FBP1 | CAACGUGACAGGUGAUCAA | NM_000507 |
| 2308 | FBP1 | UGGCCUACGUCAUGGAGAA | NM_000507 |
| 2309 | FBP1 | UUGAGUGGAUGGAGGAGAA | NM_000507 |
| 2310 | FBP1 | CGUCAUUCCCACAGACAUU | NM_000507 |
| 2311 | FBP1 | UGGACAAGGAUGUGAAGAU | NM_000507 |
| 2312 | FBP1 | CCAACGACCUGGUUAUGAA | NM_000507 |
| 2313 | FBP1 | GACAAGGAUGUGAAGAUAA | NM_000507 |
| 2314 | FBP1 | CGUGUCAGAAGAAGAUAAA | NM_000507 |
| 2315 | FBP1 | UGGAGGAGAAAUAAACUUA | NM_000507 |
| 2316 | FBP1 | UGACAGGUGAUCAAGUUAA | NM_000507 |
| 2317 | FBP1 | GCACAGCAGUCAAAGCCAU | NM_000507 |
| 2318 | FBP1 | CAUCAAAUGCUGUAGAAUG | NM_000507 |
| 2319 | FBP1 | UGAGAAGGAUGCUCUGCAA | NM_000507 |
| 2320 | FBP1 | UGCCACUGGUGUUAAGAUA | NM_000507 |
| 2321 | FEP1 | CUAGAGAGCAGAAAUAAAA | NM_000507 |
| 2322 | FBP1 | UCCUGAAGGUGUAUGAGAA | NM_000507 |
| 2323 | FBP1 | AGAUAAACACGCCAUCAUA | NM_000507 |
| 2324 | FBP1 | UCGAGUUCCUGAAGGUGUA | NM_000507 |
| 2325 | FBP1 | CAUAAUGCCACUGGUGUUA | NM_000507 |
| 2326 | FBP2 | GUGAAGGACUAGAAAUAAA | NM_003837 |
| 2327 | FBP2 | CAGAGGAUGUGCAGGAAUA | NM_003837 |
| 2328 | FBP2 | GGAAAUACGUGGUCUGCUU | NM_003837 |
| 2329 | FBP2 | GAGAUGAGGUGAAGAAACU | NM_003837 |
| 2330 | FBP2 | AAACAGAGAUGGUAGCUAU | NM_003837 |
| 2331 | FBP2 | CGGGAGAUGAGGUGAAGAA | NM_003837 |
| 2332 | FBP2 | GGAAAGAUUUACAGCCUGA | NM_003837 |
| 2333 | FBP2 | ACGUGAAGCCCGAGGCAAU | NM_003837 |
| 2334 | FBP2 | CCACUGAAUAUGUGCAGAA | NM_003837 |
| 2335 | FBP2 | UGGUCAAUGUGAAGGACUA | NM_003837 |
| 2336 | FBP2 | CCUAAAUGAACGAUAAACA | NM_003837 |
| 2337 | FBP2 | GCGUUAACGUGACGGGAGA | NM_003837 |
| 2338 | FBP2 | GAAGAAACUGGAUGUGCUA | NM_003837 |
| 2339 | PBP2 | GACCCUAAAUGAACGAUAA | NM_003837 |
| 2340 | FBP2 | GAGAAAAGGAUUUGAAGCA | NM_003837 |
| 2341 | FBP2 | GAGGAUGAGCCUUCUGAAA | NM_003837 |
| 2342 | PBP2 | CCAAUUCCCUGGUGAUCAA | NM_003837 |
| 2343 | FBP2 | GAAAAGGAUUUGAAGCAUU | NM_003837 |
| 2344 | FBP2 | GCAGGCAGCUAGCGAGUUU | NM_003837 |
| 2345 | FBP2 | GGUUAUGCGCUGUACGGUA | NM_003837 |
| 2346 | FBP2 | UGACGGGAGAUGAGGUGAA | NM_003837 |
| 2347 | FBP2 | GCGCUGUACGGUAGUGCAA | NM_003837 |
| 2348 | FBP2 | AAAGAAAUUCCCUGAGGAU | NM_003837 |
| 2349 | FBP2 | ACAGAAGAGCAACAACAAA | NM_003837 |
| 2350 | FBP2 | GGACCCUAAAUGAACGAUA | NM_003837 |
| 2351 | FBP2 | GCAGGAAGCGUUAACGUGA | NM_003837 |
| 2352 | FBP2 | UCUAAGGACCCUAAAUGAA | NM_003837 |
| 2353 | FBP2 | AGGUAAAUCCACUUAAUCA | NM_003837 |
| 2354 | FBP2 | AUACAGAAGAGCAACAACA | NM_003837 |
| 2355 | FBP2 | ACUCAAUGCUGACGGCCAU | NM_003837 |
| 2357 | FHIT | AGAAAGAGAAAGAAGGUAU | NM_002012 |
| 2358 | FHIT | CAGGAAGGCUGGAGACUUU | NM_002012 |
| 2359 | FHIT | GAAGGGAGAGAAAGAGAAA | NM_002012 |
| 2360 | FHIT | GGAGAUCAGAGGAGGAAAU | NM_002012 |
| 2361 | FHIT | AGAAGGUAUCCUAGGAAUA | NM_002012 |
| 2362 | FHIT | GGUGGAAGGGAGAGAAAGA | NM_002012 |
| 2363 | FHIT | AUGAGGAGOUCCAGAAACA | NM_002012 |
| 2364 | FHIT | GUAAAGGUCCGUAGUGCUA | NM_002012 |
| 2365 | FHIT | GAAGAGAAAUCCACUGAGA | NM_002012 |
| 2366 | FHIT | AGGAAUACCUGCCUGCUUA | NM_002012 |
| 2367 | FHIT | GGAGGAAAUGGCAGCAGAA | NM_002012 |
| 2368 | FHIT | GGAAGGGAGAGAAAGAGAA | NM_002012 |
| 2369 | FHIT | CCCAAGAGGAACUGAAUCA | NM_002012 |
| 2370 | FHIT | GAAUAGGAAACCUGUGGUA | NM_002012 |
| 2371 | FHIT | AGGUAGCAGUCUUCUGAAA | NM_002012 |
| 2372 | FHIT | AGAGAAAGAAGGUAUCCUA | NM_002012 |
| 2373 | FHIT | CUGAUGAAGUGGCCGAUUU | NM_002012 |
| 2374 | FHIT | CUGGAGACUUUCACAGGAA | NM_002012 |
| 2375 | FHIT | GGAGAGAAAGAGAAAGAAG | NM_002012 |
| 2376 | FHIT | AAGAAGGUAUCCUAGGAAU | NM_002012 |
| 2377 | FHIT | AGAGAAAUCCACUGAGAAC | NM_002012 |
| 2378 | FHIT | GAGAAAGAGAAAGAAGGUA | NM_002012 |
| 2379 | FHIT | GAAAGAAGGUAUCCUAGGA | NM_002012 |
| 2380 | FHIT | GGACAUGUCGUUCAGAUUU | NM_002012 |
| 2381 | FHIT | UCGGCAGCCUUAUGAUUAA | NM_002012 |
| 2382 | FHIT | UGACCUGCGUCCUGAUGAA | NM_002012 |
| 2383 | FHIT | GUUCAGAUUUGGCCAACAU | NM_002012 |
| 2384 | FHIT | CCACUGAGGACUCCGAAGA | NM_002012 |
| 2385 | FHIT | GAUCCUGAAUUCCAGCAAA | NM_002012 |
| 2386 | FLJ14427 | CAGAGUGGAUGGAGGAGAA | NM_032781 |
| 2387 | FLJ14427 | CGGAAGAACCGGUACAAAA | NM_032781 |
| 2388 | FLJ14427 | AGCAAUAAACGGAGCAUUU | NM_032781 |
| 2389 | FLJ14427 | GAGCCAGGAGUGAGAGAGA | NM_032781 |
| 2390 | FLJ14427 | UCACCAACAUCGAGGAGAU | NM_032781 |
| 2391 | FLJ14427 | CCAGAAUGUUUCCGUGCUA | NM_032781 |
| 2392 | FLJ14427 | GGGAGGAGAAGGUGUACAU | NM_032781 |
| 2393 | FLJ14427 | GGAUGGAGGAGAAGAUCGA | NM_032781 |
| 2394 | PLJ14427 | AGGCGGAAUUCUUUGAAAU | NM_032781 |
| 2395 | FLJ14427 | ACACCUUGGGAAUGAAUUA | NM_032781 |
| 2396 | FLJ14427 | UCAUUCACACGGAGGAUUA | NM_032781 |
| 2397 | FLJ14427 | UCGAGGAGAUGAACGAGAA | NM_032781 |
| 2398 | FLJ14427 | GAGCGAGGCCUGAAGCAUU | NM_032781 |
| 2399 | FLJ14427 | CGAGGAGGGCUUUGGCUAU | NM_032781 |
| 2400 | FLJ14427 | GGAGUGAGAGAGAGAACCA | NM_032781 |
| 2401 | FLJ14427 | AAGCAUUACUGGUUCACAU | NM_032781 |
| 2402 | FLJ14427 | GACAUGUGCUGCAGUGAGA | NM_032781 |
| 2403 | FLJ14427 | GAAGGUCACCAGAGAGCUU | NM_032781 |
| 2404 | FLJ20442 | GAUGAAGGGAAGUGGACUA | NM_017823 |
| 2405 | FLJ20442 | GGGAAGUGGACUAAAGUAU | NM_017823 |
| 2406 | FLJ20442 | GAAGUGGACUAAAGUAUUA | NM_017823 |
| 2407 | FLJ20442 | GGGCUUGGCUGCAGGAGAU | NM_017823 |
| 2408 | PLJ20442 | GCACCAUGCUGGCCUGUUA | NM_017823 |
| 2409 | FLJ20442 | AGACCUAUGAGCAGGAGAA | NM_017823 |
| 2410 | FLJ20442 | GUACUGCUUUGUUGAAUAA | NM_017823 |
| 2411 | FLJ20442 | GGAAGUGGACUAAAGUAUU | NM_017823 |
| 2412 | FLJ20442 | GGCUGAAGACACUGAAGUA | NM_017823 |
| 2413 | FLJ20442 | CCUGUUACCUGGUGAAGGA | NM_017823 |
| 2414 | FLJ20442 | UGUACUGCUUUGUUGAAUA | NM_017823 |
| 2415 | FLJ20442 | AAGCAGUCUUCCAGUUCUA | NM_017823 |
| 2416 | FLJ20442 | AGGAGAUGCCAUUGCUGAA | NM_017823 |
| 2417 | FLJ20442 | CCUAUGAGCAGGAGAAAGC | NM_017823 |
| 2418 | FLJ20442 | GAAGGGAAGUGGACUAAAG | NM_017823 |
| 2419 | FLJ20442 | GGAGAUGCCAUUGCUGAAA | NM_017823 |
| 2420 | FLJ20442 | UCUACCAGCGAACGAAAUA | NM_017823 |
| 2421 | FLJ20442 | AGAAAGCAGUCUUCCAGUU | NM_017823 |
| 2422 | FLJ20442 | GAGAUGCCAUUGCUGAAAU | NM_017823 |
| 2423 | FLJ20442 | GCUGAAAUCCGACGACUAC | NM_017823 |
| 2424 | FLJ20442 | CCCAUUGGCUGAAGACACU | NM_017823 |
| 2425 | FLJ20442 | CUGCUUUGUUGAAUAAAUG | NM_017823 |
| 2426 | FLJ20442 | UGAAAUCCGACGACUACGA | NM_017823 |
| 2427 | FLJ20442 | GAAAGCAGUCUUCCAGUUC | NM_017823 |
| 2428 | FLJ20442 | GCAGGAGAAAGCAGUCUUC | NM_017823 |
| 2429 | FLJ20442 | CAACUUCUCCUGGGUGCUU | NM_017823 |
| 2430 | FLJ20442 | GGCUUGUACUGCUUUGUUG | NM_017823 |
| 2431 | FLJ20442 | GGAGGCUUGUACUGCUUUG | NM_017823 |
| 2432 | FLJ20442 | AAAGCAGUCUUCCAGUUCU | NM_017823 |
| 2433 | FLJ20442 | GGGAGGCUUGUACUGCUUU | NM_017823 |
| 2434 | FLJ22405 | GAAUAUAAAGAUCGGGAUU | NM_022485 |
| 2435 | FLJ22405 | CCUCUGAGAAGGUGGACAA | NM_022485 |
| 2436 | FLJ22405 | GCAGAAGGGCUCAUAUUUA | NM_022485 |
| 2437 | FLJ22405 | CAGAAGGGCUCAUAUUUAA | NM_022485 |
| 2438 | FLJ22405 | UGAUAAGGUCAGAGGCUAU | NM_022485 |
| 2439 | FLJ22405 | AGCAAUGCCUUGUGAAGAA | NM_022485 |
| 2440 | FLJ22405 | GUGGAGAACAAGAAGGUGA | NM_022485 |
| 2441 | FLJ22405 | UGGACAAAGCCCAGCGCUA | NM_022485 |
| 2442 | FLJ22405 | GCAAAGGGGAGGAGAUUUU | NM_022485 |
| 2443 | FLJ22405 | AGAACAAGAAGGUGAAGUU | NM_022485 |
| 2444 | FLJ22405 | CCUGAGUGAUCGAGAGACU | NM_022485 |
| 2445 | FLJ22405 | GAGAAAGACACGUUUGAGA | NM_022485 |
| 2446 | FLJ22405 | CUGAAGACCCAGAGGAGGA | NM_022485 |
| 2447 | FLJ22405 | ACCUGAUGGUGGAGAACAA | NM_022485 |
| 2448 | FLJ22405 | GGGAGCUGCUGGAGGAGUU | NM_022485 |
| 2449 | FLJ22405 | GUAUCCAGGCUGUGAAUUU | NM_022485 |
| 2450 | FLJ22405 | GGACAAAGCCCAGCGCUAU | NM_022485 |
| 2451 | FLJ22405 | UGGAGAACAAGAAGGUGAA | NM_022485 |
| 2452 | FLJ22405 | AAGUUUGGCAUGAAUGUAA | NM_022485 |
| 2453 | FLJ22405 | AGAAUGAGGCAGUUUGACA | NM_022485 |
| 2454 | FLJ22405 | CAGUAUCAGUGUUGGGAUC | NM_022485 |
| 2455 | FLJ22405 | GGACUGUGCUCUUCGAAGU | NM_022485 |
| 2456 | PLJ22405 | GUGACCUGAUGGUGGAGAA | NM_022485 |
| 2457 | PLJ22405 | GAGUAUGAGAGUUCUGAGA | NM_022485 |
| 2458 | FLJ22405 | UGACACAGAUCACAAAAUA | NM_022485 |
| 2459 | FLJ22405 | GGUGAAGUUUGGCAUGAAU | NM_022485 |
| 2460 | FLJ22405 | CGGUUUGUCUGCCCAGUAA | NM_022485 |
| 2461 | FLJ22405 | GGAAGCAGGACUACGUUGA | NM_022485 |
| 2462 | FLJ22405 | GCCCAGUAAUCCUGUUCAA | NM_022485 |
| 2463 | PLJ22405 | AGAGAUGUCUGGAGCUGUU | NM_022485 |
| 2464 | FLJ32332 | GCACAAGGGACAAGAGGAA | NM_144641 |
| 2465 | FLJ32332 | CUACAAACGUGUGGAGAAA | NM_144641 |
| 2466 | FLJ32332 | GAUUAUCAAUGCAGAGAAA | NM_144641 |
| 2467 | FLJ32332 | GCUACAAACGUGUGGAGM | NM_144641 |
| 2468 | FLJ32332 | AGUCAGAGCUGGAAGUGUA | NM_144641 |
| 2469 | FLJ32332 | ACACAAACAUCCAGCUCAA | NM_144641 |
| 2470 | FLJ32332 | GCACACAGGGAAAGGAAGA | NM_144641 |
| 2471 | FLJ32332 | GGGCAGAAGACUUGGUGAU | NM_144641 |
| 2472 | FLJ32332 | GGAGAGUGCCUUUCAGGAA | NM_144641 |
| 2473 | FLJ32332 | GGUGCGGAGAGAUGAGAUA | NM_144641 |
| 2474 | FLJ32332 | GGACAGAAGGUUUUGUUCA | NM_144641 |
| 2475 | FLJ32332 | GGGCAUCCCUCCAGUGUGA | NM_144641 |
| 2476 | FLJ32332 | ACAUCCAUCUCAAGAGGAA | NM_144641 |
| 2477 | FLJ32332 | GCAGCAAGCCCAAGUAGUU | NM_144641 |
| 2478 | FLJ32332 | GCAUCAGGGCAGAAGACUU | NM_144641 |
| 2479 | FLJ32332 | CAGAGUGACUUUACAACUU | NM_144641 |
| 2480 | FLJ32332 | GAGAGUGCCUUUCAGGAAU | NM_144641 |
| 2481 | FLJ32332 | AGGAAUGUGAUGAGGUGAU | NM_144641 |
| 2482 | FLJ32332 | GCUUCUGGCUGGUGAGUUC | NM_144641 |
| 2483 | FLJ32332 | GGGUAGGCAGGCUCGGUUA | NM_144641 |
| 2484 | FLJ32332 | ACAAACGUGUGGAGAAAUC | NM_144641 |
| 2485 | FLJ32332 | AUGAGUGGCUGGAGCUACA | NM_144641 |
| 2486 | FLJ32332 | CAACACACAUCCAUCUCAA | NM_144641 |
| 2487 | FLJ32332 | UAUCAGGGCAUGUGUUCAA | NM_144641 |
| 2488 | FLJ32332 | AGAAAUCGGAUCUCAAGUA | NM_144641 |
| 2489 | FLJ32332 | GGAAAGCUGUACAUGGCCA | NM_144641 |
| 2490 | FLJ32332 | CUCAAGAGGAACAUUUAUA | NM_144641 |
| 2491 | FLJ32332 | CUCAGUUUGUGGAGGAAAA | NM_144641 |
| 2492 | FLJ32332 | CCAGAGACUCGGAUUAUCA | NM_144641 |
| 2493 | FLJ32332 | GCAGGUGGCUUGUAGAAAC | NM_144641 |
| 2494 | FLJ40125 | GGAAGGGACUUAAGAGAAA | NM_178494 |
| 2495 | FLJ40125 | GAUAGAGAGGCAAGAGUAA | NM_178494 |
| 2496 | FLJ40125 | GAGUAAAGCUAGCAAAGGA | NM_178494 |
| 2497 | FLJ40125 | GGGCUUUGAUAGAGAGGCA | NM_178494 |
| 2498 | FLJ40125 | GGAUAGGACUCAAGCGAAG | NM_178494 |
| 2499 | FLJ40125 | GGGCGUGGUCUUUUGGAAA | NM_178494 |
| 2500 | FLJ40125 | AGAGAAAGGGCGUGGUCUU | NM_178494 |
| 2501 | FLJ40125 | CAGCAGAGGGAGAGAGCCU | NM_178494 |
| 2502 | FLJ40125 | UGGAAGGGACUUAAGAGAA | NM_178494 |
| 2503 | FLJ40125 | GGAGGAGGGCUUUGAUAGA | NM_178494 |
| 2504 | FLJ40125 | GCUGGAAGGUGGAAGAGCA | NM_178494 |
| 2505 | FLJ40125 | GUGGAAGGGACUUAAGAGA | NM_178494 |
| 2506 | FLJ40125 | UGAUAGAGAGGCAAGAGUA | NM_178494 |
| 2507 | FLJ40125 | CAAGAGUAAAGCUAGCAAA | NM_178494 |
| 2508 | FLJ40125 | GGGAUAGGACUCAAGCGAA | NM_178494 |
| 2509 | FLJ40125 | AGGAGGGCUUUGAUAGAGA | NM_178494 |
| 2510 | FLJ40125 | AGGCUGAGGACGAGUUCAU | NM_178494 |
| 2511 | FLJ40125 | CGGGAGAGUUAGUGGAAGG | NM_178494 |
| 2512 | FLJ40125 | GCUCACUGCACUUGGCUUU | NM_178494 |
| 2513 | FLJ40125 | GCAAGAGUAAAGCUAGCAA | NM_178494 |
| 2514 | FLJ40125 | UUGAGGCACGGGAGAGUUA | NM_178494 |
| 2515 | FLJ40125 | AGUUAGUGGAAGGGACUUA | NM_178494 |
| 2516 | FLJ40125 | GGAGAGAGCCUCGGGGUUU | NM_178494 |
| 2517 | FLJ40125 | GGCCGGAAGUAUUGAUUAG | NM_178494 |
| 2518 | FLJ40125 | GGGAGGAGGGCUUUGAUAG | NM_178494 |
| 2519 | FLJ40125 | UAGAGAGGCAAGAGUAAAG | NM_178494 |
| 2520 | FLJ40125 | GAGAGAGCCUCGGGGUUUU | NM_178494 |
| 2521 | FLJ40125 | GCACUUGGCUUUCGUUACC | NM_178494 |
| 2522 | FLJ40125 | GAAGGUGGAAGAGCAGGUA | NM_178494 |
| 2523 | FLJ40125 | CCGGAAGUAUUGAUUAGUG | NM_178494 |
| 2524 | GSBS | GAACAGAGAUCGUGGAUUA | NM_006658 |
| 2525 | GSBS | GGAAAUAAAGCUACAUCUA | NM_006658 |
| 2526 | GSBS | CCAAAGCAAUCGUGGAAGA | NM_006658 |
| 2527 | GSBS | UGAUUGUGCUGGAGAAGAA | NM_006658 |
| 2528 | GSBS | AAGCAAUCGUGGAAGAUGA | NM_006658 |
| 2529 | GSBS | AGAAACAGAUCAUCCUAAA | NM_006658 |
| 2530 | GSBS | GAGAAUGUUUGGACUCUAA | NM_006658 |
| 2531 | GSBS | UCACAAAGAUGGAAAAGAU | NM_006658 |
| 2532 | GSBS | ACACUGACCUGGAACAGAA | NM_006658 |
| 2533 | GSBS | CCUGAGACCACUUGUAAAU | NM_006658 |
| 2534 | GSBS | GAUGAUGUCCACUGAGCAA | NM_006658 |
| 2535 | GSBS | AAAGGAUGGUGACAAGAUA | NM_006658 |
| 2536 | GSBS | GGAGAGAGGUGAGAACUAU | NM_006658 |
| 2537 | GSBS | ACAAGUGAGUCAUUAUCAA | NM_006658 |
| 2538 | GSBS | GAUGGUGACAAGAUAGCUA | NM_006658 |
| 2539 | GSBS | CCAGAUACUCUAAAUGUGA | NM_006658 |
| 2540 | HSPC129 | CCUAAGGAAGAGAGAGAAA | NM_016396 |
| 2541 | HSPC129 | UGUGGAAGCUGAAGAAAUA | NM_016396 |
| 2542 | HSPC129 | GAAAGUUGGUUUAUGGAUA | NM_016396 |
| 2543 | HSPC129 | AAACAGAUAUCUCGAGUAA | NM_016396 |
| 2544 | HSPC129 | GGAAAUAUUCAGAGGUUGA | NM_016396 |
| 2545 | HSPC129 | AGAAGAAGCAGAAGAAACA | NM_016396 |
| 2546 | HSPC129 | CAACAGGAAUGGCCAGUAA | NM_016396 |
| 2547 | HSPC129 | ACAGAUAUCUCGAGUAAGA | NM_016396 |
| 2548 | HSPC129 | GAGGAAAUAUUCAGAGGUU | NM_016396 |
| 2549 | HSPC129 | GCGUAUAUCUCAAAUGGUA | NM_016396 |
| 2550 | HSPC129 | GCUAGAAGAUGCAGCACUU | NM_016396 |
| 2551 | HSPC129 | GGAUGAAACACUAGUGCAU | NM_016396 |
| 2552 | HSPC129 | GAGACUGGGUAGAUAAGAA | NM_016396 |
| 2553 | HSPC129 | UGACAGAAGAACAACUAAA | NM_016396 |
| 2554 | HSPC129 | CAGACAAGUUACUGAACAU | NM_016396 |
| 2555 | HSPC129 | GCACAGUGACUCAGUAUUU | NM_016396 |
| 2556 | HSPC129 | GGGAAAGACACCACACAUU | NM_016396 |
| 2557 | HSPC129 | UAACAGUAGCUAUGCAUAA | NM_016396 |
| 2558 | HSPC129 | CACAAGAGGUUGAUAUUUU | NM_016396 |
| 2559 | HSPC129 | CACCUAAGGAAGAGAGAGA | NM_016396 |
| 2560 | HSPC129 | CUAAGAAGGUGUAUGCAGA | NM_016396 |
| 2561 | HSPC129 | CCUAUAGAAAGUUGGUUUA | NM_016396 |
| 2562 | HSPC129 | GGAGAAGCUUGGUAGUUAU | NM_016396 |
| 2563 | HSPC129 | CAAGAGACUGGGUAGAUAA | NM_016396 |
| 2564 | HSPC129 | GAAAGUACAGUAUUGGAAA | NM_016396 |
| 2565 | HSPC129 | UGUAAAGGAUGUCAAAGAA | NM_016396 |
| 2566 | HSPC129 | GCAAUGGCACACAGAUUUA | NM_016396 |
| 2567 | HSPC129 | UGGAGAAGCUUGGUAGUUA | NM_016396 |
| 2568 | HSPC129 | CUAGGCAACUCCAGUGAAA | NM_016396 |
| 2569 | HSPC129 | GAAGAAGACUGGGAAGUAU | NM_016396 |
| 2570 | GBP1 | GGAAAAGAGUGCUGAGAAA | NM_001551 |
| 2571 | IGBP1 | AUAAAGAUCCUGAGAGAAA | NM_001551 |
| 2572 | IGBP1 | AAAUAAAGAUCCUGAGAGA | NM_001551 |
| 2573 | IGBP1 | GAGCAUAGGUUGUCUGCAA | NM_001551 |
| 2574 | IGBP1 | CUUCAGAGGUGGAUUGAUA | NM_001551 |
| 2575 | IGBP1 | GGAAGAGGAUGAUGAACAA | NM_001551 |
| 2576 | IGBP1 | UAGAAGAGAUUGAGAGCAU | NM_001551 |
| 2577 | IGBP1 | GAGAAAUGGCUCUGUAUAA | NM_001551 |
| 2578 | IGBP1 | UCGGAAAUAUGGAGCAUUA | NM_001551 |
| 2579 | IGBP1 | AGGCUAAAAUACAGAGAUA | NM_001551 |
| 2580 | IGBP1 | GGAAAGUGGUCAAGCAGAU | NM_001551 |
| 2581 | IGBP1 | AGGAAGAACAAGAAGAAAA | NM_001551 |
| 2582 | IGBP1 | GCAUUGACCAGGAAAUAAA | NM_001551 |
| 2583 | IGBP1 | AGUAAAGUGUCAAGUGAUU | NM_001551 |
| 2584 | IGBP1 | AGGAAGAGGAUGAUGAACA | NM_001551 |
| 2585 | IGBP1 | CAGCAAGCGUCUAGAUCAU | NM_001551 |
| 2586 | IGBP1 | CAACUAUGACGGUGAGUGA | NM_001551 |
| 2587 | IGBP1 | AGAGAUACAAGCAGAAGAA | NM_001551 |
| 2588 | IGBP1 | CACCAGAGGAAUUCAGAAA | NM_001551 |
| 2589 | IGBP1 | AAGUAGAAGUGGCGACUGA | NM_001551 |
| 2590 | IGBP1 | AGGCAGCACCAGAGGAAUU | NM_001551 |
| 2591 | IGBP1 | GAGCAUUGACCAGGAAAUA | NM_001551 |
| 2592 | IGBP1 | GCUAAAAUACAGAGAUACA | NM_001551 |
| 2593 | IGBP1 | AAUGAAAUCUGCUGUGGAA | NM_001551 |
| 2594 | IGBP1 | ACAGGAAGAACAAGAAGAA | NM_001551 |
| 2595 | IGBP1 | GAUACAAGCAGAAGAAGGA | NM_001551 |
| 2596 | IGBP1 | UGGGAUGACUGGAAGGACA | NM_001551 |
| 2597 | IGBP1 | AAGAAGAAAAGGAGGAAGA | NM_001551 |
| 2598 | IGBP1 | AGAAGAAGGAGUUGGAGCA | NM_001551 |
| 2599 | IGBP1 | CAGAAAAGCAGCUCAGCAA | NM_001551 |
| 2600 | ILAKAP | GGUAAAGACUGAAGGGAAA | NM_030768 |
| 2601 | ILAKAP | GGAAAGGAGCAAAGAGAAA | NM_030768 |
| 2602 | ILAKAP | GUGAAGAGCUUGUGGAAAA | NM_030768 |
| 2603 | ILAKAP | UGUAAUCAGUGUAGAGAAA | NM_030768 |
| 2604 | ILAKAP | CAGAAGAAGCCGUGAACUU | NM_030768 |
| 2605 | ILAKAP | CGGGAAAGAAGCUCAGAAA | NM_030768 |
| 2606 | ILAKAP | UGGUAAAGACUGAAGGGAA | NM_030768 |
| 2607 | ILAKAP | UGAUGGACAUGGAGGAAUU | NM_030768 |
| 2608 | ILAKAP | GGGAAAGGAGCAAAGAGAA | NM_030768 |
| 2609 | ILAKAP | GUUAUAAUGAGGAGAGUCA | NM_030768 |
| 2610 | ILAKAP | ACAGAAGGCUGGAGGAAAC | NM_030768 |
| 2611 | ILAKAP | GCAACAGGCUGGCCAACAA | NM_030768 |
| 2612 | ILAKAP | GCUAUGUGGCUGAGCGGAA | NM_030768 |
| 2613 | ILAKAP | AGGGAAAGGAGCAAAGAGA | NM_030768 |
| 2614 | ILAKAP | UAUAAUGAGGAGAGUCAAA | NM_030768 |
| 2615 | ILAKAP | GGAAAGAAGCUCAGAAAGG | NM_030768 |
| 2616 | ILAKAP | UCAAUAUCCCAGAUGGUAA | NM_030768 |
| 2617 | ILAKAP | CAAUAUCCCAGAUGGUAAA | NM_030768 |
| 2618 | ILAKAP | AUGAAGAGUUCCUUAAACA | NM_030768 |
| 2619 | ILAKAP | GCAUAAUCCAACUCAGUAU | NM_030768 |
| 2620 | ILAKAP | CAGUGAAGAGCUUGUGGAA | NM_030768 |
| 2621 | ILAKAP | UCCCAUGGUUGUAAAUAAA | NM_030768 |
| 2622 | ILAKAP | GAAUGGCAGUGAAGAGCUU | NM_030768 |
| 2623 | ILAKAP | AAACAAGCUUCCAGCCAGA | NM_030768 |
| 2624 | ILAKAP | AGAGAAGAAUGGCAGUGAA | NM_030768 |
| 2625 | ILAKAP | AUGAAGAGCGGAUGAGGAU | NM_030768 |
| 2626 | ILAKAP | CUCCCAUGGUUGUAAAUAA | NM_030768 |
| 2627 | ILAKAP | GGUUGUAAAUAAAGGUUUC | NM_030768 |
| 2628 | ILAKAP | GGAGGAAACGUCAGGGAUG | NM_030768 |
| 2629 | ILAKAP | CUGUGAUGGUGGUGCGGAU | NM_030768 |
| 2630 | IMPA1 | GUAUAUAGGUGCAGAGACA | NM_005536 |
| 2631 | IMPA1 | GCUUUAAAGUCUUGUGUAA | NM_005536 |
| 2632 | IMPA1 | AAGACAAGCUGGAGAGGUA | NM_005536 |
| 2633 | IMPA1 | GGGCAUUUCUGCAGUGAAU | NM_005536 |
| 2634 | IMPA1 | AAACAGACUACUAGACUUA | NM_005536 |
| 2635 | IMPA1 | CACCAGAGACUGUGAGAAU | NM_005536 |
| 2636 | IMPA1 | GCUAAAGAAAUUCAGGUUA | NM_005536 |
| 2637 | IMPA1 | GAAAGGAUAGCUAAAGAAA | NM_005536 |
| 2638 | IMPA1 | GGUAGUUUGUGAAGCUAUA | NM_005536 |
| 2639 | IMPA1 | GAAUAUUAGCAGAAAGGAU | NM_005536 |
| 2640 | IMPA1 | CAGAAAGGAUAGCUAAAGA | NM_005536 |
| 2641 | IMPA1 | UGGCUUUGCUGUAAAUAAA | NM_005536 |
| 2642 | IMPA1 | GCACGUAAACAGACUACUA | NM_005536 |
| 2643 | IMPA1 | ACUACAAGUUUCACAACAA | NM_005536 |
| 2644 | IMPA1 | CAUCAAUGGAUAUGUGUUU | NM_005536 |
| 2645 | IMPA1 | CAUCAGAUAGCAUGGCUUA | NM_005536 |
| 2646 | IMPA1 | GGAAACAUACCCAGGAAGU | NM_005536 |
| 2647 | IMPA1 | GGCAGGAAUGCAUGGAUUA | NM_005536 |
| 2648 | IMPA1 | CAGGAAGUACAGUUGAUAA | NM_005536 |
| 2649 | 1MPA1 | JGGCAGGAAUGCAUGGAUU | NM_005536 |
| 2650 | IMPA1 | GGUGACUCAUCAAUGGAUA | NM_005536 |
| 2651 | IMPA1 | UGCAGUAACUCUAGCAAGA | NM_005536 |
| 2652 | IMPA1 | AGCAGAAAGGAUAGCUAAA | NM_005536 |
| 2653 | IMPA1 | AGAUGUACACUGCCAGAAA | NM_005536 |
| 2654 | 1MPA1 | GGUUUGACUGCUAUAAUUA | NM_005536 |
| 2655 | IMPA1 | GCACCUGGCCCAUUACAUA | NM_005536 |
| 2656 | IMPA1 | GGAUGUUACAGGUGGACCA | NM_005536 |
| 2657 | IMPA1 | GGAUUAUGCAGUAACUCUA | NM_005536 |
| 2658 | IMPA1 | UGUUACAGGUGGACCAUUU | NM_005536 |
| 2659 | IMPA1 | AGAAAGGAUAGCUAAAGAA | NM_005536 |
| 2660 | 1MPA2 | ACUCAAAUCUCCUGUGAAA | NM_014214 |
| 2661 | IMPA2 | CUGCAGAUCUUGUGACAGA | NM_014214 |
| 2662 | 1MPA2 | UCAAAUCUCCUGUGAAAUA | NM_014214 |
| 2663 | 1MPA2 | GCUCAUAGCUCAGGCCUUA | NM_014214 |
| 2664 | IMPA2 | CAAGGACAGAUCAUCAGAA | NM_014214 |
| 2665 | IMPA2 | GCUUGAAUUCGGAGUGAUU | NM_014214 |
| 2666 | IMPA2 | CAGAUCACCUUGUGGAAGA | NM_014214 |
| 2667 | IMPA2 | GCAAUUUUGUGCACAGAUU | NM_014214 |
| 2668 | IMPA2 | CCACAGUCAUCAUCAGAGA | NM_014214 |
| 2669 | IMPA2 | UGACUGCGGCUGAGGCAAA | NM_014214 |
| 2670 | IMPA2 | GGUAAUAAGGCUUUAGAAC | NM_014214 |
| 2671 | IMPA2 | UGGAUUUGCUGUUCGACAA | NM_014214 |
| 2672 | IMPA2 | GUAAUAAGGCUUUAGAACU | NM_014214 |
| 2673 | IMPA2 | GCAGAUCUUGUGACAGAAA | NM_014214 |
| 2674 | IMPA2 | UCUCAAAGGCCUUGGUUCU | NM_014214 |
| 2675 | IMPA2 | UUGAAUUCGGAGUGAUUUA | NM_014214 |
| 2676 | IMPA2 | GCUUUAGAACUGCUGAUAA | NM_014214 |
| 2677 | IMPA2 | UAAUAAGGCUUUAGAACUG | NM_014214 |
| 2678 | IMPA2 | CCUUACAGACGAUUAACUA | NM_014214 |
| 2679 | IMPA2 | CUGAGUUGCGAGAGAGGUU | NM_014214 |
| 2680 | IMPA2 | ACACAGGUUCAUUGCAGAA | NM_014214 |
| 2681 | IMPA2 | CGACUGUGGCGGUUAGCAU | NM_014214 |
| 2682 | IMPA2 | GGGAGAUGGCGAUGCUCAU | NM_014214 |
| 2683 | IMPA2 | GGACAGAUCAUCAGAAAAG | NM_014214 |
| 2684 | IMPA2 | UCACCUUGUGGAAGAUUUA | NM_014214 |
| 2685 | IMPA2 | AUUUCUGAGUUGCGAGAGA | NM_014214 |
| 2686 | IMPA2 | GUGAGUGGCUGGCCUUUUA | NM_014214 |
| 2687 | IMPA2 | GAGCUUGAAUUCGGAGUGA | NM_014214 |
| 2688 | IMPA2 | CAGGCGGCAUCGUGAUAGA | NM_014214 |
| 2689 | IMPA2 | UGAUAAAGCGGAUCGUUCU | NM_014214 |
| 2690 | INPP1 | AGAAAGAAAUCCAGAAACA | NM_002194 |
| 2691 | INPP1 | GCAAAGUCCUCAAUGGUAA | NM_002194 |
| 2692 | INPP1 | GAAAGAAUGCUUAGAAAGA | NM_002194 |
| 2693 | INPP1 | GGAAGAAACAGCAGAGCUU | NM_002194 |
| 2694 | INPP1 | AGAAGAAACGGCAGUGAAA | NM_002194 |
| 2695 | INPP1 | CAGCAGAGCUUCUUAGCAA | NM_002194 |
| 2696 | INPP1 | CAAUAGUAGACUUGAAAGA | NM_002194 |
| 2697 | INPP1 | CGUAAUUAGUACAAGUGAA | NM_002194 |
| 2698 | INPP1 | GGGAAUAGUAGACUUGAAA | NM_002194 |
| 2699 | INPP1 | AAGAAAAGAAAGAGGGAGA | NM_002194 |
| 2700 | INPP1 | GGUAGCAUCUGAAGCAUUA | NM_002194 |
| 2701 | INPP1 | AGAAGAAUCCAAUGAGUUU | NM_002194 |
| 2702 | INPP1 | GGAAGCGGCUGGAGACAUU | NM_002194 |
| 2703 | INPP1 | CCUCAAUGGUAACAAGGUA | NM_002194 |
| 2704 | INPP1 | GUUCAGAAAUGUCAGAUAU | NM_002194 |
| 2705 | INPP1 | AACAGAAUAUGGAGAACAA | NM_002194 |
| 2706 | INPP1 | GAAAAGAAAGAGGGAGAAA | NM_002194 |
| 2707 | INPP1 | GAGAAAAGAACAAGAAGUU | NM_002194 |
| 2708 | INPP1 | CAAUCAACCUUUUGUGUCA | NM_002194 |
| 2709 | INPP1 | AAGAAACGGCAGUGAAACA | NM_002194 |
| 2710 | INPP1 | GAGAAGAAUCCAAUGAGUU | NM_002194 |
| 2711 | INPP1 | UAUCAAAGCUGCAUUGUCA | NM_002194 |
| 2712 | INPP1 | AGAAAGAGGGAGAAAAGAA | NM_002194 |
| 2713 | INPP1 | GGUGGAAAGGACAGUGCUA | NM_002194 |
| 2714 | INPP1 | UGGAAAGGACAGUGCUAUU | NM_002194 |
| 2715 | INPP1 | CAACAAGGGAGGACUCAUU | NM_002194 |
| 2716 | INPP1 | GAGCCUAUGUGUUGUCCAA | NM_002194 |
| 2717 | INPP1 | JGGUACAGGAAGUUAUAAA | NM_002194 |
| 2718 | INPP1 | AGGGAGGACUCAUUGCAUA | NM_002194 |
| 2719 | INPP1 | GUGAAACACACACUGGAAA | NM_002194 |
| 2720 | INPP4A | CCACAUGGUCCGAGAGCAA | NM_001566 |
| 2721 | INPP4A | UGGCAAUGCUGGAGGACAU | NM_004027 |
| 2722 | INPP4A | CCGAAGGGACUUACGGAAA | NM_004027 |
| 2723 | INPP4A | CAUCAUAGGUUGCAUUUAA | NM_004027 |
| 2724 | INPP4A | CCAAGAAGGCCAUGGUAUU | NM_001566 |
| 2725 | INPP4A | GUGCAUGCCCGGAAGAAUA | NM_001566 |
| 2726 | INPP4A | UCAUCAACGUGGAGAGUUU | NM_001566 |
| 2727 | INPP4A | GGAUCAUGGACUUGAGGAA | NM_001566 |
| 2728 | INPP4A | AUACAAAGGAUGAGAGUUC | NM_001566 |
| 2729 | INPP4A | CCACAAACUUGCACAUACA | NM_001566 |
| 2730 | INPP4A | GGACAUGAGCCUUGGGAUC | NM_001566 |
| 2731 | INPP4A | UUGAAGAGACCAAGAAACA | NM_001566 |
| 2732 | INPP4A | ACAAAUUUGAAGAGACCAA | NM_004027 |
| 2733 | INPP4A | AGACUGAAGGAUUGGUUUA | NM_004027 |
| 2734 | INPP4A | GUGUAUGAUGUCAAAGAUA | NM_004027 |
| 2735 | INPP4A | GAAUAAGAACGUCGACAUU | NM_001566 |
| 2736 | INPP4A | GAUGAGAGUUCAAGACGAU | NM_001566 |
| 2737 | INPP4A | GCUGGCAGAUGGAGGAGAA | NM_001566 |
| 2738 | INPP4A | GAAGAGACCAAGAAACAUU | NM_004027 |
| 2739 | INPP4A | GCACAAAUUUGAAGAGACC | NM_001566 |
| 2740 | INPP4A | CGAAGGGACUUACGGAAAA | NM_004027 |
| 2741 | INPP4A | CUGCCAAGGUUUUAAGUCA | NM_001566 |
| 2742 | INPP4A | GGGAGAAAGUGUGGCUGAA | NM_004027 |
| 2743 | INPP4A | CAGUUUGAAAGCAGAUAAA | NM_001566 |
| 2744 | INPP4A | GGAGGUAGUCACCCAGAAA | NM_001566 |
| 2745 | INPP4A | GAGUGAGGGUUGUCGAAGA | NM_004027 |
| 2746 | INPP4A | GCCGAGAGGUUUGGCGAUA | NM_004027 |
| 2747 | INPP4A | UGACGGAGGCGUUAGGAAU | NM_004027 |
| 2748 | INPP4A | UCAAGACGAUGGAGGAUCA | NM_001566 |
| 2749 | INPP4A | GGACAAGAGCCUAGAGUGC | NM_001566 |
| 2750 | INPP4B | GCAGAAACCAGGAGAUAAA | NM_003866 |
| 2751 | INPP4B | CGAUGAAAUUGGAAUGUUA | NM_003866 |
| 2752 | INPP4B | CCACAGAUGUACAGGGACA | NM_003866 |
| 2753 | INPP4B | GGACAAACUGAUUGAAAGA | NM_003866 |
| 2754 | INPP4B | GAGAAUGUACUGAAGAAUA | NM_003866 |
| 2755 | INPP4B | CAGCAGCAAAGGAGAGAAA | NM_003866 |
| 2756 | INPP4B | CCAGACAGCUUGAAGAAUU | NM_003866 |
| 2757 | INPP4B | UCUAUGAUGUCAAGGAUAA | NM_003866 |
| 2758 | INPP4B | CCGAAAUUGUGGAGGGAAC | NM_003866 |
| 2759 | INPP4B | CAAAGGAAGUUCUCAGCAA | NM_003866 |
| 2760 | INPP4B | CCGGAAAGUGUGAGCGGAA | NM_003866 |
| 2761 | INPP4B | AAAGAAGAUUUGUGCAGAA | NM_003866 |
| 2762 | INPP4B | GACAAUAAGUGGAUGCGAA | NM_003866 |
| 2763 | INPP4B | GUGCAGAAACCAGGAGAUA | NM_003866 |
| 2764 | INPP4B | UGAAAGAGAUGGUGGCAGU | NM_003866 |
| 2765 | INPP4B | GUGAUCAAAUGGUGAAUAU | NM_003866 |
| 2766 | INPP4B | CCAGAAGACUCCAAAUGAA | NM_003866 |
| 2767 | INPP4B | GGUUGAUCAUGGAAAUUAA | NM_003866 |
| 2768 | INPP4B | GAAGGUUGAUCAUGGAAAU | NM_003866 |
| 2769 | INPP4B | UAGAGAAUGUACUGAAGAA | NM_003866 |
| 2770 | INPP4B | CCAUAGAUUUGAAACAGAA | NM_003866 |
| 2771 | INPP4B | GGAAAGUGUGAGCGGAAAA | NM_003866 |
| 2772 | INPP4B | GUACAUACAGCGAUGAAAU | NM_003866 |
| 2773 | INPP4B | CAGACUAUGAUGAGGAAGA | NM_003866 |
| 2774 | INPP4B | UAUCAGAUCUUUAGUGUGA | NM_003866 |
| 2775 | INPP4B | UGGCAACAAUGAUGGAGAA | NM_003866 |
| 2776 | INPP4B | GCAUAGAGAAUGUACUGAA | NM_003866 |
| 2777 | INPP4B | CCAUCUAUGAGGAGACCAA | NM_003866 |
| 2778 | INPP4B | CCGCAAACUGAAUGGUAUU | NM_003866 |
| 2779 | INPP4B | UAAAGAACCCAGUAUGUAA | NM_003866 |
| 2780 | INPP5A | CAGAAAACCUGCAGAAGAA | NM_005539 |
| 2781 | INPP5A | GGUCGGAGAGCGAGGAGAA | NM_005539 |
| 2782 | INPP5A | CAUGGGAGAAAUAGAAAUA | NM_005539 |
| 2783 | INPP5A | AAAGAGAUCUACUCGGAUA | NM_005539 |
| 2784 | INPP5A | AUAGAAAGGUCGCUGGCAA | NM_005539 |
| 2785 | INPP5A | CCUUUGACUUGGUGAAUAU | NM_005539 |
| 2786 | INPP5A | CAGUUUGACUUUAAAGCUA | NM_005539 |
| 2787 | INPP5A | GCUAAGAAGUAUAGAAAGG | NM_005539 |
| 2788 | INPP5A | GCUACGUGCUGGACAGAAU | NM_005539 |
| 2789 | INPP5A | AGCAGUAAGUACAGCAUUA | NM_005539 |
| 2790 | INPP5A | UAGAAAGGUCGCUGGCAAA | NM_005539 |
| 2791 | INPP5A | GGAGAAGUUUCGCAGACUA | NM_005539 |
| 2792 | INPP5A | UAACAUGGGCUGUAUAUAA | NM_005539 |
| 2793 | INPP5A | UGGACAAGUUCGUCAAAGA | NM_005539 |
| 2794 | INPP5A | GGCACAAGGCACUGGGCUA | NM_005539 |
| 2795 | INPP5A | CCAAUGAAGUGGUGAAGCU | NM_005539 |
| 2796 | INPP5A | GAGUCUACCUGGAUGAAAA | NM_005539 |
| 2797 | INPP5A | GGACAAGUUCGUCAAAGAA | NM_005539 |
| 2798 | INPP5A | GUCAUAACCUUGUUGCAAA | NM_005539 |
| 2799 | INPP5A | GUGAUGCGAUGAAAGAAUA | NM_005539 |
| 2800 | INPP5A | GUGCAAAUGGUCAAGAAAA | NM_005539 |
| 2801 | INPP5A | GCAAAGAGAUCUACUCGGA | NM_005539 |
| 2802 | INPP5A | AUUAGAAGGUGAUUAGAGA | NM_005539 |
| 2803 | INPP5A | GUGGAGACGCUCUGCACAA | NM_005539 |
| 2804 | INPP5A | GACAACGACCGGAAGGUUA | NM_005539 |
| 2805 | INPP5A | GAAGGUGAUUAGAGAGUCU | NM_005539 |
| 2806 | INPP5A | CAACACACAAAUUCGUAAA | NM_005539 |
| 2807 | INPP5A | CGAGUGAUGCGAUGAAAGA | NM_005539 |
| 2808 | INPP5A | GAGUGCAAAUGGUCAAGAA | NM_005539 |
| 2809 | INPP5A | AGAAGUUUCCGCAGGACUA | NM_005539 |
| 2810 | INPP5B | GAGGAAGCAGGCAGGGAAA | XM_375718 |
| 2811 | INPP5B | GGAUGAGGAGCUUGAGGAA | XM_375718 |
| 2812 | INPP5B | CGGAAGAAACGGUGGGGAU | XM_375718 |
| 2813 | INPP5B | GGAAGAAACGGUGGGGAUU | XM_375718 |
| 2814 | INPP5B | UGAGGAAGCAGGCAGGGAA | XM_375718 |
| 2815 | INPP5B | AAGACAGGCUUUCGAUUGA | XM_375718 |
| 2816 | INPP5B | CCAAAGUCCUGGUGGCCCU | XM_375718 |
| 2817 | INPP5D | GUUCCAGGCUCUUGAAAUA | NM_005541 |
| 2818 | INPP5D | CGACAGGGAUGAAGUACAA | NM_005541 |
| 2819 | INPP5D | GGGUGGAGAUAUAGAUAAU | NM_005541 |
| 2820 | INPP5D | GCAAGGAGCUCUAUGGAGA | NM_005541 |
| 2821 | INPP5D | GGGAGAAGCUCUAUGACUU | NM_005541 |
| 2822 | INPP5D | GGACAAGAGCCAAGGGAAG | NM_005541 |
| 2823 | INPP5D | AAACAGAGAAGGAGAAGAU | NM_005541 |
| 2824 | INPP5D | GCUAAGUGCUUUACGAACA | NM_005541 |
| 2825 | INPP5D | GAGUUUUACAAGAAGGAAA | NM_005541 |
| 2826 | 1NPP5D | GCACCUGGAACAUGGGUAA | NM_005541 |
| 2827 | INPP5D | UGAAUAAGUUGGUGAUCUU | NM_005541 |
| 2828 | INPP5D | GGAAUUGCGUUUACACUUA | NM_005541 |
| 2829 | INPP5D | GAAUUAAUGUAGGGAGCUA | NM_005541 |
| 2830 | INPP5D | GCUCAUUAAGUCACAGAAA | NM_005541 |
| 2831 | INPP5D | CGACGUUGAGUCUGGGAAA | NM_005541 |
| 2832 | INPP5D | CUGCAUUGCCCUUCGGUUA | NM_005541 |
| 2833 | INPP5D | GAGAAGGAGUGGCUGGAGA | NM_005541 |
| 2834 | INPP5D | GCCCAAUGAAGAUGAUAAA | NM_005541 |
| 2835 | INPP5D | ACAAAUACGCCUACACCAA | NM_005541 |
| 2836 | INPP5D | GGAAACUGAUCAUUAAGAA | NM_005541 |
| 2837 | INPP5D | GCAGAAACCAUCAUCCAAA | NM_005541 |
| 2838 | INPP5D | AGACCAAGUCCCAGACCAA | NM_005541 |
| 2839 | INPP5D | GGGACAAGAGCCAAGGGAA | NM_005541 |
| 2840 | INPP5D | GAAAAGAAACUCAGGCGAA | NM_005541 |
| 2841 | INPP5D | GCACGAGGGUCCUGAGUCU | NM_005541 |
| 2842 | INPP5D | GCAGAAAGCGACAGGGAUG | NM_005541 |
| 2843 | INPP5D | UGGAAACAGAGAAGGAGAA | NM_005541 |
| 2844 | INPP5D | GAGACUGACUCGGGACAAA | NM_005541 |
| 2845 | INPP5D | GGUGAAGUUUGGUGAGACU | NM_005541 |
| 2846 | INPP5D | CGGUUAGAGGCCACAGAAA | NM_005541 |
| 2847 | INPP5E | GCGAAAUACCUUAGUGGAA | NM_015160 |
| 2848 | INPP5E | CGAGAUAUGAAGCGPAAUA | NM_015160 |
| 2849 | INPP5E | GAGAAAUGGUAGAAAUCAU | NM_015160 |
| 2850 | INPP5E | GAAUAAGUUUGGACAGUUU | NM_015160 |
| 2851 | INPP5E | CGAAGGAGAUUCAGAGGCA | NM_019892 |
| 2852 | INPP5E | GAAAUACCUUAGUGGAAUU | NM_015160 |
| 2853 | INPP5E | GGUCCUGAGCAGUGAGAGA | NM_019892 |
| 2854 | INPP5E | UGGCAAAUUUGAUAGAGAA | NM_019892 |
| 2855 | INPP5E | CGAAAUACCUUAGUGGAAU | NM_015160 |
| 2856 | INPP5E | UUGCCAAGCUAGAAAGAGA | NM_015160 |
| 2857 | INPP5E | AGUCAGAACUCCAGCACCA | NM_019892 |
| 2858 | INPP5E | CGUCCAAGGCGGAGAAUCU | NM_019892 |
| 2859 | INPP5E | GCUCAGAGGUGGAGUGCUC | NM_019892 |
| 2860 | INPP5E | CCAAGACAGGUUCGAGAAA | NM_015160 |
| 2861 | INPP5E | GACAAGGGCUGGAGGAGGA | NM_019892 |
| 2862 | INPP5E | AGACGGAUUUCGAAGGAGA | NM_019892 |
| 2863 | INPP5E | GGGAAGGACACGUACGACA | NM_019892 |
| 2864 | INPP5E | GGGAUUGCCAAGCUAGAAA | NM_015160 |
| 2865 | INPP5E | CGGAAAGGGUCCAUCUUCA | NM_019892 |
| 2866 | INPP5E | CUGGCAAAUUUGAUAGAGA | NM_019892 |
| 2867 | INPP5E | GAAAUGUGCCCGACACCAA | NM_019892 |
| 2868 | INPP5E | GCGUGGCAUCUCAGAAUAA | NM_015160 |
| 2869 | INPP5E | GGUCCAUCUUCAAGGGCUU | NM_019892 |
| 2870 | INPP5E | CAGAAUAAGUUUGGACAGU | NM_015160 |
| 2871 | INPP5E | AAAGUAACCACAUUGGAUA | NM_015160 |
| 2872 | INPP5E | CAGUAGGAAUUCUUAUCAA | NM_015160 |
| 2873 | INPP5E | GCACACAGCUUCCCUGGUA | NM_015160 |
| 2874 | INPP5E | GGAGUUACCUGGAGGGCAG | NM_019892 |
| 2875 | INPP5E | AGGCACCACUGGAUGUAUA | NM_015160 |
| 2876 | INPP5E | GAACUGUACUUACUAGGAA | NM_019892 |
| 2877 | INPP5E | GCAUCGUGUCUCAGAUCAA | NM_019892 |
| 2878 | 1NPP5E | ACAUCUGUCCUGUGAGCUA | NM_019892 |
| 2879 | INPP5E | GGAAUUAAAAGACGGAUUU | NM_019892 |
| 2880 | INPP5E | CAAAUUUGAUAGAGAACUG | NM_019892 |
| 2881 | INPP5E | CAAACAAGGUCGACUCGGA | NM_019892 |
| 2882 | INPP5E | AGCAAGCACUACAGAGUCA | NM_019892 |
| 2883 | INPP5E | GGACAGCAAACAAGGUCGA | NM_019892 |
| 2884 | INPPL1 | CAAGAAGAGCUUUGAGAAU | NM_001567 |
| 2885 | INPPL1 | CUACCUGCCUGGAGGAAUA | NM_001567 |
| 2886 | INPPL1 | AGGCAGGAGCAAAGAGCAA | NM_001567 |
| 2887 | INPPL1 | ACAUUGAGUUUGAGAGCAU | NM_001567 |
| 2888 | INPPL1 | AUGCAAUCACUGUGGAAUA | NM_001567 |
| 2889 | INPPL1 | AUUUGAAGAACCAGAGAAA | NM_001567 |
| 2890 | INPPL1 | GGGAGAGCAUCCAGGAAGA | NM_001567 |
| 2891 | INPPL1 | GUCCGGAAAUGAAGGAAUA | NM_001567 |
| 2892 | INPPL1 | AGAAGAGCUUUGAGAAUGA | NM_001567 |
| 2893 | INPPL1 | GGGAGAAGCACAAGGUCUU | NM_001567 |
| 2894 | INPPL1 | CUGUAGAGGGUGAGCGAGA | NM_001567 |
| 2895 | INPPL1 | CCAAGAACAGCUUCAAUAA | NM_001567 |
| 2896 | INPPL1 | AGGAGGGCCUGGUGCAUAA | NM_001567 |
| 2897 | INPPL1 | AGGAAUACAAGAAGAGCUU | NM_001567 |
| 2898 | INPPL1 | UGUCAGGCAUCCAGAAGAA | NM_001567 |
| 2899 | INPPL1 | UGUCAGUGCUAAAGGACUU | NM_001567 |
| 2900 | INPPL1 | CCUUUGAGGUGAAGCUAGA | NM_001567 |
| 2901 | INPPL1 | GAACAUGGGAAGUGUACCA | NM_001567 |
| 2902 | INPPL1 | GAACUACAUCAGCAGGAAA | NM_001567 |
| 2903 | INPPL1 | GGAGAGCACCUUAAUAUUA | NM_001567 |
| 2904 | INPPL1 | UCACAGAAGUUCACGCUGA | NM_001567 |
| 2905 | INPPL1 | CCAUCGGCUUGGAGCGCUA | NM_001567 |
| 2906 | INPPL1 | AAGAAAGGGCUCUCAAAGA | NM_001567 |
| 2907 | INPPL1 | CCCAAGAACAGCUUCAAUA | NM_001567 |
| 2908 | INPPL1 | UGUUGCAGCUCAUGAAGAA | NM_001567 |
| 2909 | INPPL1 | CCAAGAAAGGGCUCUCAAA | NM_001567 |
| 2910 | INPPL1 | CCAAGAACAAAGUGGCCAU | NM_001567 |
| 2911 | INPPL1 | GCACCAAGUUCUUCAUCGA | NM_001567 |
| 2912 | INPPL1 | ACAAGAAGAGCUUUGAGAA | NM_001567 |
| 2913 | INPPL1 | UGGAAAUCCUACCCUGAAA | NM_001567 |
| 2914 | KIAA0931 | AAGAAGAAGUGAAGGAACA | XM_041191 |
| 2915 | KIAA0931 | UUGAAAAUCUGGAGGGAAA | XM_041191 |
| 2916 | KIAA0931 | CUGAGUAGCUUGAGUCUUA | XM_041191 |
| 2917 | KIAA0931 | CUGAAUAGGAUGAACCAUA | XM_041191 |
| 2918 | KIAA0931 | GAGCAGAAAUUGUUUGAAU | XM_041191 |
| 2919 | KIAA0931 | CAGAAGUGCCCAAGAGGAA | XM_041191 |
| 2920 | KIAA0931 | GCUAAGAAGCUGUGCACAU | XM_041191 |
| 2921 | KIAA0931 | CGAGAAAGAGACUGGCUAA | XM_041191 |
| 2922 | KIAA0931 | AGGUAGAGGUGGAAGUAGA | XM_041191 |
| 2923 | KIAA0931 | GGAAAGACCCAGCUGCAUA | XM_041191 |
| 2924 | KIAA0931 | GCACUGGAGAGGAGAGUUU | XM_041191 |
| 2925 | KIAA0931 | AAGAGAAGAUGUAAAGAGA | XM_041191 |
| 2926 | KIAA0931 | AAGUAUUAGAUGUGAGCUA | XM_041191 |
| 2927 | KIAA0931 | GUGGAAAGAUAGAAGAAGU | XM_041191 |
| 2928 | KIAA0931 | GCUGGAGAGGGAAGAGAAA | XM_041191 |
| 2929 | KIAA0931 | GAAAUAAGCUGUGUGUCU | XM_041191 |
| 2930 | KIAA0931 | GAAUAGGAGAAGUAGGUUU | XM_041191 |
| 2931 | KIAA0931 | GAGAGGAGAGUUUGAGUAU | XM_041191 |
| 2932 | KIAA0931 | GCAGCAAGGUAGAGGUGGA | XM_041191 |
| 2933 | KIAA0931 | GGCUAAGAGAAGAUGUAAA | XM_041191 |
| 2934 | KIAA0931 | GUCAAAUUCCUGAGGUUUA | XM_041191 |
| 2935 | KIAA0931 | UGGAAGAAGAAGUGAAGGA | XM_041191 |
| 2936 | KIAA0931 | UUUGAAUAUUGGUGAGGAA | XM_041191 |
| 2937 | KIAA0931 | CAACAAAGUGAAUGGGGUA | XM_041191 |
| 2938 | KIAA0931 | GUAAAGAGAGGCUGUGUUU | XM_041191 |
| 2939 | KIAA0931 | CGCAAUGGGAGCAGAAAUU | XM_041191 |
| 2940 | KIAA0931 | GAAAGAUAGAAGAAGUGAA | XM_041191 |
| 2941 | KIAA0931 | AUAUCAAGCAUGUGGAUUU | XM_041191 |
| 2942 | KIAA0931 | GAUCAGAAACCUUUGCCAA | XM_041191 |
| 2943 | KIAA0931 | UGAAGGAACAAAUGAAACA | XM_041191 |
| 2944 | LAANPL | CAACAUAGUUCAUGGAUUU | NM_030920 |
| 2945 | LAANPL | AGUAGUAGCUGAAGAGCAA | NM_030920 |
| 2946 | LAANPL | GCAACUGUGUUUUGAAUAA | NM_030920 |
| 2947 | LAANPL | GAGAUGAAGMGAAGAUUAA | NM_030920 |
| 2948 | LAANPL | GAUUUGAUCAGGAGGAUAA | NM_030920 |
| 2949 | LAANPL | GAGUAUGGCUAAUGUGGAA | NM_030920 |
| 2950 | LAANPL | ACAUGGAGAUGAAGAAGAA | NM_030920 |
| 2951 | LANPL | AGGAAAACCUUUAGUCUUA | NM_030920 |
| 2952 | LANPL | UGAAGACGAUGGAGAGGAA | NM_030920 |
| 2953 | LANPL | CAAUUGCCUGUUGAUAUA | NM_030920 |
| 2954 | LANPL | GCAACAUAGUUCAUGGAUU | NM_030920 |
| 2955 | LANPL | GGAGGAGGUGACAGAGUUA | NM_030920 |
| 2956 | LANPL | GUAAUAUGGUUCAUGGAUU | NM_030920 |
| 2957 | LANPL | GAUAAUUGCCUGUGUGUCA | NM_030920 |
| 2958 | LCK | GAAGAUGACUGGAUGGAAA | NM_005356 |
| 2959 | LCK | AGGGAGAGGUGGUGAAACA | NM_005356 |
| 2960 | LCK | ACACGAAGGUGGCGGUGAA | NM_005356 |
| 2961 | LCK | UCAACAAACUCCUGGACAU | NM_005356 |
| 2962 | LCK | GAGAGGUGGUGAAACAUUA | NM_005356 |
| 2963 | LCK | CCUUCAAUUUUGUGGCCAA | NM_005356 |
| 2964 | LCK | GCAGUGUGCUGGAGGACUU | NM_005356 |
| 2965 | LCK | GGGCCAAGUUUCCCAUUAA | NM_005356 |
| 2966 | LCK | COUGAGACCACCAGAGAGA | NM_005356 |
| 2967 | LCK | GCACACAUCAGGAGUUCAA | NM_005356 |
| 2968 | LCK | CAUCAGGAGUUCAAUAAAU | NM_005356 |
| 2969 | LCK | GAAUGGGAGUCUAGUGGAU | NM_005356 |
| 2970 | LCK | GGACAUGGCAGCCCAAAUU | NM_005356 |
| 2971 | LCK | GGGAGAAGCCUGGGAUUGA | NM_005356 |
| 2972 | LCK | CCACAGAGGGCCAGUACCA | NM_005356 |
| 2973 | LCK | CGCCAGAAGCCAUUAACUA | NM_005356 |
| 2974 | LCK | GCUCACACCCGGAAGAUGA | NM_005356 |
| 2975 | LCK | UCACUGAAUACAUGGAGAA | NM_005356 |
| 2976 | LCK | GCACGCUGCUCAUCCGAAA | NM_005356 |
| 2977 | LCK | JGACCAACCCGGAGGUGAU | NM_005356 |
| 2978 | LCK | AGGCCAACCUCAUGAAGCA | NM_005356 |
| 2979 | LOK | CUGAAUACAUGGAGAAUGG | NM_005356 |
| 2980 | LOK | UCACAUGGCCUAUGCACAU | NM_005356 |
| 2981 | LCK | CCAACAUUCUGGUGUCUGA | NM_005356 |
| 2982 | LCK | CGACGGAGAUCUGGGCUUU | NM_005356 |
| 2983 | LCK | GGACAGCGCCAGAAGCCAU | NM_005356 |
| 2984 | LCK | ACACAUCAGGAGUUCAAUA | NM_005356 |
| 2985 | LCK | AUUGAAGAGCGGAAUUAUA | NM_005356 |
| 2986 | LCK | CCAAAUUGCAGAAGGCAUG | NM_005356 |
| 2987 | LCK | GGCCAGGACUUUAUCUAAU | NM_005356 |
| 2988 | LOC145553 | CAUAAGAGCAGGUGAGGUA | NM_138476 |
| 2989 | LOC145553 | GGCCUAAACUGAAAGGAAA | NM_138476 |
| 2990 | LOC145553 | AACUCUAAGUCAAGGGUUA | NM_138476 |
| 2991 | LOC145553 | UCACACACUUUGAGAGGUU | NM_138476 |
| 2992 | LOC145553 | ACUGAAAGGAAAUCAAGAA | NM_138476 |
| 2993 | LOC145553 | UUGAGAGGUUGCAGCAGAA | NM_138476 |
| 2994 | LOC145553 | CAGCAAGAUCACACACUUU | NM_138476 |
| 2995 | L0C145553 | CAUUUGAGGCCUAAACUGA | NM_138476 |
| 2996 | LOC145553 | GGCCGAAGCUGGCAGUCUU | NM_138476 |
| 2997 | LOC145553 | CAGGUGCAUUUGUAAUUUA | NM_138476 |
| 2998 | LOC145553 | UUUGAGGCCUAAACUGAAA | NM_138476 |
| 2999 | LOC145553 | UAUUGUAGACGUCAGCAAA | NM_138476 |
| 3000 | LOC145553 | GCAGCAAGAUCACACACUU | NM_138476 |
| 3001 | LOC151242 | GAAGAAGGCACCAAUGAAA | XM_087137 |
| 3002 | LOC151242 | CAGCAGAGCAGAUCAGGAA | XM_087137 |
| 3003 | LOC151242 | CUGAAAGGCCAGAAUGAAU | XM_087137 |
| 3004 | LOC151242 | CAGCAUUCCCUGAAGAAGA | XM_087137 |
| 3005 | LOC151242 | CAAAGGAAGCAGAGUGUGU | XM_087137 |
| 3006 | LOC151242 | CCAAUGAAAGAGAGGAGCA | XM_087137 |
| 3007 | LOC151242 | GAGCAGAUCAGGAAAAGAA | XM_087137 |
| 3008 | LOC151242 | GCAGAGCAGAUCAGGAAAA | XM_087137 |
| 3009 | LOC151242 | CCCCAGAAAUAGAUGACAA | XM_087137 |
| 3010 | LOC151242 | AGAAGAAGGCACCAAUGAA | XM_087137 |
| 3011 | LOC151242 | CUGAAGAAGAAGAAGGCAC | XM_087137 |
| 3012 | LOC151242 | AAAGAGAGGAGCAGCGGGA | XM_087137 |
| 3013 | LOC151242 | CUGAAGCAGCAGAGCAGAU | XM_087137 |
| 3014 | LOC151242 | AGGAGCAGCGGGACCAUUA | XM_087137 |
| 3015 | LOC151242 | AGAAGGCACCAAUGAAAGA | XM_087137 |
| 3016 | LOC151242 | AGAAGAAGAAGGCACCAAU | XM_087137 |
| 3017 | LOC151242 | AAGAAGAAGGCACCAAUGA | XM_087137 |
| 3018 | LOC151242 | GGGUUAAGCAUCUGAAAGG | XM_087137 |
| 3019 | LOC151242 | AGCAUUCCCUGAAGAAGAA | XM_087137 |
| 3020 | LOC151242 | CAACACACAAGGGGAAUUA | XM_087137 |
| 3021 | LOC151242 | GUACACACCACCCACCAUA | XM_087137 |
| 3022 | LOC151242 | CAUAAAAGGGGUUAAGCAU | XM_087137 |
| 3023 | LOC151242 | UGAAAGGCCAGAAUGAAUC | XM_087137 |
| 3024 | LOC151242 | GAAAGGCCAGAAUGAAUCA | XM_087137 |
| 3025 | LOC151242 | GGAGCAGCGGGACCAUUAA | XM_087137 |
| 3026 | LOC151242 | ACACACCACCCACCAUAAA | XM_087137 |
| 3027 | LOC151242 | CCAGAAAUAGAUGACAAGA | XM_087137 |
| 3028 | LOC151242 | CACUUGUGAUUCUCAAUGA | XM_087137 |
| 3029 | LOC151242 | GAAGAAGAAGGCACCAAUG | XM_087137 |
| 3030 | LOC151242 | GAAGCAGCAGAGCAGAUCA | XM_087137 |
| 3031 | LOC151742 | GUAAAUAGCUGUAGAGUCA | NM_139245 |
| 3032 | LOC151742 | GGAUAGAAUUUGAGAGAGU | NM_139245 |
| 3033 | LOC151742 | GUGGGAAACUACUGGGAUA | NM_139245 |
| 3034 | LOC151742 | GAGCAUAGUUUUACAGUCA | NM_139245 |
| 3035 | LOC151742 | GAUAAGUGGGCCAGAAUUA | NM_139245 |
| 3036 | LOC151742 | GUUCAGAAAUAGCAGCAAA | NM_139245 |
| 3037 | LOC151742 | GGAGUGAGCUGGUGAGGUU | NM_139245 |
| 3038 | LOC151742 | AGGAAAUGAUACUGAAUGA | NM_139245 |
| 3039 | LOC151742 | CAGGAUAGAAUUUGAGAGA | NM_139245 |
| 3040 | LOC151742 | GGUCUUAGGUCUAUAAUCA | NM_139245 |
| 3041 | LOC151742 | GUGAAUAGCAUAUGUGUCA | NM_139245 |
| 3042 | LOC151742 | UGUAAUAGGCAGCUGUUAA | NM_139245 |
| 3043 | LOC151742 | GCGUGAACCCAUAUUGAUA | NM_139245 |
| 3044 | LOC151742 | UUGAGAGAGUGAAGAAAUU | NM_139245 |
| 3045 | LOC151742 | GUAAUAGGCAGCUGUUAAA | NM_139245 |
| 3046 | LOC151742 | GGACUACGAGAAAGACAAA | NM_139245 |
| 3047 | LOC151742 | CAACAGAUACCCUGAUUUU | NM_139245 |
| 3048 | LOC151742 | AACAGUAGAUGAAGGAAAU | NM_139245 |
| 3049 | LOC151742 | UAACAGUCAUGGUGGUGAA | NM_139245 |
| 3050 | LOC151742 | CAAGUAAGCUGUUUGCAUU | NM_139245 |
| 3051 | LOC151742 | GGGAUAAGCUUCUCCUUGA | NM_139245 |
| 3052 | LOC151742 | GCAGAUUUGGAAUGGUUUA | NM_139245 |
| 3053 | LOC151742 | AGAGAGGGCUAGACCAGAA | NM_139245 |
| 3054 | LOC339221 | GCAAAUAUAUCGAGAACCA | NM_178543 |
| 3055 | LOC339221 | GAAUUAACGUCCAGUUCAA | NM_178543 |
| 3056 | LOC339221 | GUUUGAGCUCCUGGACUAA | NM_178543 |
| 3057 | LOC339221 | GAGACGGAGUGGAGAGCGA | NM_178543 |
| 3058 | LOC339221 | CGGCAAAUAUAUCGAGAAC | NM_178543 |
| 3059 | LOC339221 | AUCCAGAGGUGGUGGGACA | NM_178543 |
| 3060 | LOC339221 | GCAUGACGACCGUGGACAA | NM_178543 |
| 3061 | LOC339221 | CAACAAGGACAUGGACAU | NM_178543 |
| 3062 | LOC339221 | GGAAAGAAGGCAUCGCACA | NM_178543 |
| 3063 | LOC339221 | GGAACUACGACCAGGAUGU | NM_178543 |
| 3064 | LOC339221 | AAGAAGGGAGGCUGGAGAA | NM_178543 |
| 3065 | LOC339221 | GAGCGAACAUCGACACAGU | NM_178543 |
| 3066 | LOC339221 | GCUUUGACAACAAGGACAU | NM_178543 |
| 3067 | LOC339221 | ACACAGUGAUGGCGUGGUU | NM_178543 |
| 3068 | LOC339221 | AGUCAGGGCUCCCAGAACA | NM_178543 |
| 3069 | LOC339221 | CAGAGGAGGACCUGGAUCU | NM_178543 |
| 3070 | LOC339221 | UCUACAAGAAGGAGGCGUU | NM_178543 |
| 3071 | LOC339221 | CUGGCGACCUGGUUGAAUU | NM_178543 |
| 3072 | LOC339221 | AAGAAGGCAUCGCACACAA | NM_178543 |
| 3073 | LOC339221 | GAGCACCGGUACAAAGUCA | NM_178543 |
| 3074 | LOC339221 | GCGAACAUCGACACAGUGA | NM_178543 |
| 3075 | LOC339221 | UGGUUGAAUUCCACAAGUU | NM_178543 |
| 3076 | LOC339221 | GGAGGCUGGAGAAGGUGUA | NM_178543 |
| 3077 | LOC339221 | GGAGAAUUAACGUCCAGUU | NM_178543 |
| 3078 | LOC339221 | AAGGGAGGCUGGAGAAGGU | NM_178543 |
| 3079 | LOC339221 | CCGUGAUUCUUCUGUCUGA | NM_178543 |
| 3080 | LOC339221 | GCUGUGGGCCCUAGCUUCA | NM_178543 |
| 3081 | LOC339221 | CGUCAUCCAUGGGAGAAUU | NM_178543 |
| 3082 | LOC339221 | GAGAAUUAACGUCCAGUUC | NM_178543 |
| 3083 | LOC339221 | GGAUGCUGCUCCCUAAAGA | NM_178543 |
| 3084 | LOC92235 | GAGAAAGAGAGGACAGAAA | XM_043739 |
| 3085 | LOC92235 | UGAAGAAGAGGGAGAGAAA | XM_043739 |
| 3086 | LOC92235 | AGAAGAAGGUCAAGGAAGA | XM_043739 |
| 3087 | LOC92235 | GAUGGAAGAUCAAGAGAAU | XM_043739 |
| 3088 | LOC92235 | GGUCUGAAGAAGAGGGAGA | XM_043739 |
| 3089 | LOC92235 | AGGAAGAAAUGGACGAUGA | XM_043739 |
| 3090 | LOC92235 | GGGAGGAAGAGGAAGAAAU | XM_043739 |
| 3091 | LOC92235 | AAGAAGAGGGAGAGAAAGA | XM_043739 |
| 3092 | LOC92235 | GCGGAAAGUUGCAGAAGCA | XM_043739 |
| 3093 | LOC92235 | GUGUAGAGGUGGAUGACUU | XM_043739 |
| 3094 | LOC92235 | CUGGAAAGAUGGAAGAUCA | XM_043739 |
| 3095 | LOC92235 | ACGAGGAGGAGGAGGAGAA | XM_043739 |
| 3096 | LOC92235 | CAGCAGAGACAAAGAGGUU | XM_043739 |
| 3097 | LOC92235 | AGGAGAGAGAAGAGGACUA | XM_043739 |
| 3098 | LOC92235 | GCAAAUGGCAACUCUGUAA | XM_043739 |
| 3099 | LOC92235 | CGUCUGAGUUCCUGGAUGA | XM_043739 |
| 3100 | LOC92235 | GGAUGACGCCUGAGCCAAA | XM_043739 |
| 3101 | LOC92235 | GGGAGAAGAUGUCUGAGUA | XM_043739 |
| 3102 | LOC92235 | GGGGAAGGGAGGAGGAGAA | XM_043739 |
| 3103 | LOC92235 | GGUCAAGGAAGAUGAGGAU | XM_043739 |
| 3104 | LOC92235 | UCAAGAAGAAGAAGGUCAA | XM_043739 |
| 3105 | LOC92235 | UCAAGGAAGAUGAGGAUGA | XM_043739 |
| 3106 | LOC92235 | AGAAGGAGGAGGAGAGCGA | XM_043739 |
| 3107 | LOC92235 | CCGCAGUAAUUCCCAGAAA | XM_043739 |
| 3108 | LOC92235 | GCUCAGAAGCAAAAUGAAA | XM_043739 |
| 3109 | LOC92235 | GGUCUCAGAUGCAGAAACA | XM_043739 |
| 3110 | LOC92235 | CUGACAAUGUGGACCUAAA | XM_043739 |
| 3111 | LOC92235 | GCACUGACAGGGAGGAAGA | XM_043739 |
| 3112 | LOC92235 | ACGAGGACGUGGAGAGGAU | XM_043739 |
| 3113 | LOC92235 | GCGAGGAGGACGAAGCCAA | XM_043739 |
| 3114 | LPPR4 | UUUAAUAGGAGGAGGAAUU | NM_014839 |
| 3115 | LPPR4 | UGGAAUAAUCUGCGGGCUA | NM_014839 |
| 3116 | LPPR4 | GGUUAAAAGCUGCUGAAAA | NM_014839 |
| 3117 | LPPR4 | AGGAGAGGCCAAAGGGCAA | NM_014839 |
| 3118 | LPPR4 | CCCGAAAACACUAGAAAUA | NM_014839 |
| 3119 | LPPR4 | CCACCAUGGUCCUGGCAAU | NM_014839 |
| 3120 | LPPR4 | CCAGUAGAGGGCAGCGAAA | NM_014839 |
| 3121 | LPPR4 | GGGUCGGACUAGAGCCCAA | NM_014839 |
| 3122 | LPPR4 | CCUCACAGUUGGUGCACAU | NM_014839 |
| 3123 | LPPR4 | GAUUAUGGUAGGAGAAGGA | NM_014839 |
| 3124 | LPPR4 | GAAUAAGAAUGAAAGUCGA | NM_014839 |
| 3125 | LPPR4 | CCUACAUUGUGGAAGAUAU | NM_014839 |
| 3126 | LPPR4 | AGUAGAGGGCAGCGAAAUU | NM_014839 |
| 3127 | LPPR4 | CUACAUUGUGGAAGAUAUU | NM_014839 |
| 3128 | MAP3K7IP1 | GGGACUUGUUUGAAAGAAA | NM_006116 |
| 3129 | MAP3K7IP1 | CCACAGAGAACGAGGAUGA | NM_006116 |
| 3130 | MAP3K7IP1 | CAGCAGAAAUGGAAGAAAA | NM_006116 |
| 3131 | MAP3K7IP1 | GGGAUUACAAGGUUAAAUA | NM_006116 |
| 3132 | MAP3K7IP1 | GUACAAGGCCCUAGAGGCA | NM_006116 |
| 3133 | MAP3K7IP1 | GGAGCUUGCUGCAGAGUGA | NM_006116 |
| 3134 | MAP3K7IP1 | GGAAGCAGGCCGAGAGACU | NM_006116 |
| 3135 | MAP3K7IP1 | AAAUAUGGCUACACGGACA | NM_153497 |
| 3136 | MAP3K7IP1 | AGAAGAUCCUUGAGAGACU | NM_006116 |
| 3137 | MAP3K7IP1 | GAUGAUUGACACUGAGUUU | NM_006116 |
| 3138 | MAP3K7IP1 | UCAGAAGAUCCUUGAGAGA | NM_006116 |
| 3139 | MAP3K7IP1 | CACAAAGGCUUGGGAACAA | NM_006116 |
| 3140 | MAP3K7IP1 | GUGAGAGGAUUUAAAGUCA | NM_006116 |
| 3141 | MAP3K7IP1 | GAAAGAAAGAGGAGUUGGA | NM_006116 |
| 3142 | MAP3K7IP1 | UCACAAAGGCUUGGGAACA | NM_006116 |
| 3143 | MAP3K7IP1 | CGCAAUUGCCAGAGGGAGU | NM_006116 |
| 3144 | MAP3K71P1 | AACCAAAGCCCGACCUUAA | NM_006116 |
| 3145 | MAP3K7IP1 | CCACAGCAGAAAUGGAAGA | NM_006116 |
| 3146 | MAP3K7IP1 | GCCCAGAGCACCAGCAAGA | NM_006116 |
| 3147 | MAP3K7IP1 | GUGGAUGGGUUGCAGGUGA | NM_006116 |
| 3148 | MAP3K7IP1 | UGACCCUGCUAGUGAGGAA | NM_006116 |
| 3149 | MAP3K7IP1 | AAGACGUUAGAGAGGGAAA | NM_153497 |
| 3150 | MAP3K7IP1 | GCAAGGGCACUGAGAGCCA | NM_006116 |
| 3151 | MAP3K7IP1 | GGCCUGAGUUAGACUAUUU | NM_006116 |
| 3152 | MAP3K71P1 | GCAGGUGAGAGGAUUUAAA | NM_006116 |
| 3153 | MAP3K7IP1 | UCAAGACGUUAGAGAGGGA | NM_153497 |
| 3154 | MAP3K7iP1 | AGAACGAGGAUGAGCUCUU | NM_006116 |
| 3155 | MAP3K7IP1 | GGAUUUAAAGUCAGUCACA | NM_006116 |
| 3156 | MAP3K7IP1 | ACAAAGGCUUGGGAACAAA | NM_006116 |
| 3157 | MAP3K71P1 | UCGCAGAGCCAGAAAUCCA | NM_153497 |
| 3158 | MGC1136 | GCGAAGAGAUGGUGUGAAA | NM_024025 |
| 3159 | MGC1136 | GGAAGAUGGUCCUGGGAUU | NM_024025 |
| 3160 | MGC1136 | GUGCAGAAAGUCAGGGAUA | NM_024025 |
| 3161 | MGC1136 | GGUGUAGAGUUGUGUGAAA | NM_024025 |
| 3162 | MGC1136 | CCAAGCGUCUCGAGGAUAA | NM_024025 |
| 3163 | MGC1136 | GGAGGUAGCUAGCGUGUGA | NM_024025 |
| 3164 | MGC1136 | UUGCAGAACCAGACAGAGA | NM_024025 |
| 3165 | MGC1136 | CCAUCAAGAAAGUCAAAGA | NM_024025 |
| 3166 | MGC1136 | GAGACCAGGACAUGGCUAA | NM_024025 |
| 3167 | MGC1136 | GGUAACUGGCUUUGGGCUU | NM_024025 |
| 3168 | MGC1136 | UCAAGAAAGUCAAAGACCA | NM_024025 |
| 3169 | MGC1136 | AUGCAAUGGUGUAGAGUUG | NM_024025 |
| 3170 | MGC1136 | CGUGGAGGCCAUCAAGAAA | NM_024025 |
| 3171 | MGC1136 | UGAAAUUGUCACUCGCUUA | NM_024025 |
| 3172 | MGC1136 | AGACAGACAGCGAAGAGAU | NM_024025 |
| 3173 | MGC1136 | GGAAGAUCCUGGUGCAUUG | NM_024025 |
| 3174 | MGC1136 | CGGAGUAGCUCAAGGUCUC | NM_024025 |
| 3175 | MGC1136 | ACGUGUGUGUCAUGGCUUA | NM_024025 |
| 3176 | MGC1136 | GUGCAUGGCUGGCAGUCUU | NM_024025 |
| 3177 | MGC1136 | GAGGGAAGAUCCUGGUGCA | NM_024025 |
| 3178 | MGC1136 | GCGCACACGCUGAUUUGAA | NM_024025 |
| 3179 | MGC1136 | GGCUGGCAGUCUUGAAAUU | NM_024025 |
| 3180 | MGC1136 | UGGCCUACCUCAUGCUGUA | NM_024025 |
| 3181 | MGC1136 | UCUCGAGGAUAAAUAAAGA | NM_024025 |
| 3182 | MGC1136 | GCACAGGAGGAGGUAGCUA | NM_024025 |
| 3183 | MGC1136 | GGAUACGGCAAGCAUGAAU | NM_024025 |
| 3184 | MGC1136 | GGGAAGAUCCUGGUGCAUU | NM_024025 |
| 3185 | MGC1136 | CCUCAAUGUCUUCGAGUUG | NM_024025 |
| 3186 | MGC1136 | GGCCAUCAAGAAAGUCAAA | NM_024025 |
| 3187 | MGC1136 | GCAGCUACCUGGCAACUGA | NM_024025 |
| 3188 | MGC13523 | GAUUUUGGAUGUUGGGAAA | NM_033411 |
| 3189 | MGC13523 | GUAAAUGCCCUGACGAAUA | NM_033411 |
| 3190 | MGC13523 | CGGGAAAUUUCGCUGGAUA | NM_033411 |
| 3191 | MGC13523 | CUGAAAGCGUGGAGACAGA | NM_033411 |
| 3192 | MGC13523 | AAGCAAAGCCAGUCAAGAA | NM_033411 |
| 3193 | MGC13523 | UGACGAAUAUAAAGAGGUA | NM_033411 |
| 3194 | MGC13523 | ACAGAAAGCUUGUAUAUGA | NM_033411 |
| 3195 | MGC13523 | CAGAAUUGCUUCCACGUAA | NM_033411 |
| 3196 | MGC13523 | GCAAAGCGUUCCUGCAGAA | NM_033411 |
| 3197 | MGC13523 | UUGAAGAGCCCAAGGUGAA | NM_033411 |
| 3198 | MGC13523 | GAAUAGGCCUUUAAACUUU | NM_033411 |
| 3199 | MGC13523 | GAUGUUAUCUCUAGGUUUU | NM_033411 |
| 3200 | MGC13523 | GGUUAGAUGUGACUGGAUU | NM_033411 |
| 3201 | MGC13523 | GCACAUUUCCUGUAAGCAU | NM_033411 |
| 3202 | MGC13523 | AAACCCAGCUCCAGAAUUU | NM_033411 |
| 3203 | MGC13523 | GAAUGUGGAUCUACAGUCA | NM_033411 |
| 3204 | MGC13523 | UAAUCUGUGUGGAGGGUUU | NM_033411 |
| 3205 | MGC13523 | AGAAUUGCUUCCACGUAAA | NM_033411 |
| 3206 | MGC26484 | GACCAGAACUGAAGGAAGA | NM_152627 |
| 3207 | MGC26484 | AGACACACACACAGAAAUA | NM_152627 |
| 3208 | MGC26484 | UUACAGUGCUGCAGAGAUU | NM_152627 |
| 3209 | MGC26484 | CAGAUAUUGUUGCAAGAUA | NM_152627 |
| 3210 | MGC26484 | GCAAACAAGUCAUUAGCAU | NM_152627 |
| 3211 | MGC26484 | CUGAAAAGGCGAAGACAAU | XM_373156 |
| 3212 | MGC26484 | GCAAUGGUUUACAGAUAUU | NM_152627 |
| 3213 | MGC26484 | UCAGAAGAAUUGAGGAUCU | NM_152627 |
| 3214 | MGC26484 | CAAACAAGUCAUUAGCAUU | NM_152627 |
| 3215 | MGC26484 | GAUGCUACAUGGUUAUAUA | NM_152627 |
| 3216 | MGC26484 | AGAAGCAGCAUAUAGAAUA | NM_152627 |
| 3217 | MGC26484 | CCAACAGAAACUGGAGAAA | XM_373156 |
| 3218 | MGC26484 | CAGCAUAGAUAAUGAACUC | NM_152627 |
| 3219 | MGC26484 | GUUGGAUGCUACAUGGUUA | NM_152627 |
| 3220 | MGC26484 | UGGAAGAUGUUGCAAGUCA | NM_152627 |
| 3221 | MGC26484 | ACAGAUGGCUCAUGCUAUU | NM_152627 |
| 3222 | MGC26484 | GCUGUUGCAUGUUGUAAUA | NM_152627 |
| 3223 | MGC26484 | GAGACCAUUGCGUGGGUAA | XM_373156 |
| 3224 | MGC26484 | GGAGAAUGGACAACACAGA | NM_152627 |
| 3225 | MGC26484 | CCUGAAAAGGCGAAGACAA | XM_373156 |
| 3226 | MGC26484 | GUCAAAAGAUUUCUGGAUA | NM_152627 |
| 3227 | MGC26484 | AGGCAAUGCAGUAUGGCUU | XM_374608 |
| 3228 | MGC26484 | GAUAAUACCAGACCGAUUU | NM_152627 |
| 3229 | MGC26484 | GCAAGCAAAUGUACCAAGA | NM_152627 |
| 3230 | MGC26484 | GGGUAUUCCAACAGAAACU | XM_373156 |
| 3231 | MGC26484 | GCUGGAAGAUGUUGCAAGU | NM_152627 |
| 3232 | MGC33971 | GCAUAGAAUUCCAAAGAAA | NM_153343 |
| 3233 | MGC33971 | GAAGAAUCCCUAAGAGAUA | NM_153343 |
| 3234 | MGC33971 | CCAGAAAGGACGUAACUUA | NM_153343 |
| 3235 | MGC33971 | CAAGAGAGGCAUAAACUUA | NM_153343 |
| 3236 | MGC33971 | AAUCAUGAAUCCUGGUAAA | NM_153343 |
| 3237 | MGC33971 | UCAGAGAGGUGAUGCACUA | NM_153343 |
| 3238 | MGC33971 | GCAAAGGAUCACUGCUUAA | NM_153343 |
| 3239 | MGC33971 | GCCAGGAGUUCCAGACUAA | NM_153343 |
| 3240 | MGC33971 | GCAUAAACUUAGACACAGU | NM_153343 |
| 3241 | MGC33971 | GGCCUUAUAUGGUGUGUUA | NM_153343 |
| 3242 | MGC33971 | CCACUGAGCCUGAGUUGAA | NM_153343 |
| 3243 | MGC33971 | CAUGAAUCCUGGUAAACAA | NM_153343 |
| 3244 | MGC33971 | CUGAAUAAAUGACUGAGAA | NM_153343 |
| 3245 | MGC33971 | GAGAAUGGAGAGAGCAUGA | NM_153343 |
| 3246 | MGC33971 | GGAAGAAUCCCUAAGAGAU | NM_153343 |
| 3247 | MGC33971 | UGAUUGAGCUGAAUAAGUA | NM_153343 |
| 3248 | MGC33971 | GACCUAAGUUCUUUUGAUA | NM_153343 |
| 3249 | MGC33971 | GAGCCUGAGUUGAAAUAUU | NM_153343 |
| 3250 | MGC33971 | GCAAAGGCUUCCUCAGACA | NM_153343 |
| 3251 | MGC35285 | CUAAGGAGGUGGAGAGUAA | NM_152428 |
| 3252 | MGC35285 | GGACAGAAAUACUGAAGAA | NM_152428 |
| 3253 | MGC35285 | CAGAAAUACUGAAGAACUA | NM_152428 |
| 3254 | MGC35285 | CAGAAGACCUCCAUGAAUA | NM_152428 |
| 3255 | MGC35285 | GGUUAAAGAAGAUGGGACA | NM_152428 |
| 3256 | MGC35285 | CAGCAGAAUUGCAAUGUUA | NM_152428 |
| 3257 | MGC35285 | AAGAAUAAUAGGAGGAAGA | NM_152428 |
| 3258 | MGC35285 | GAGGACAGCUGGAGGGACA | NM_152428 |
| 3259 | MGC35285 | CAUUAAUGAGGGAGAGUAU | NM_152428 |
| 3260 | MGC35285 | GUACUGCAAUGAAGAGAUA | NM_152428 |
| 3261 | MGC35285 | CCAAAGAAGUCAAUAAACU | NM_152428 |
| 3262 | MGC35285 | GCAAAGAAGGAGCAAGUUU | NM_152428 |
| 3263 | MGC35285 | CAAGGAGGCUGGAGCAGAA | NM_152428 |
| 3264 | MGC35285 | GAAAUAACCCAGAUGAAGA | NM_152428 |
| 3265 | MGC35285 | CACAAGACCAGGACAGAAA | NM_152428 |
| 3266 | MGC35285 | CUGAGUACAUCAAUGGAUA | NM_152428 |
| 3267 | MGC35285 | GCAGACAGCUCAUGGCCAA | NM_152428 |
| 3268 | MGC35285 | GUUCCAAAGAAGUCAAUAA | NM_152428 |
| 3269 | MGC35285 | CUACAGACAUCCUGAGCUU | NM_152428 |
| 3270 | MGC35285 | AGAAAGAAGUGUCUGUCUA | NM_152428 |
| 3271 | MGC35285 | CCAAGAAAGGGAUGAAUCA | NM_152428 |
| 3272 | MGC35285 | GGAACUGGUUAAAGAAGAU | NM_152428 |
| 3273 | MGC35285 | UGACAAGGCACCAGUUUUA | NM_152428 |
| 3274 | MGC35285 | AGAAAUCAGUGCUGGUGAA | NM_152428 |
| 3275 | MGC35285 | CAUGAGACUUGGAAGAUAU | NM_152428 |
| 3276 | MGC35285 | CGGGAUCGGUUGUGACCAA | NM_152428 |
| 3277 | MGC35285 | GAAAAGGAUGUGAGGCAAA | NM_152428 |
| 3278 | MGC35285 | UAUUAUACCUGGAGGACCA | NM_152428 |
| 3279 | MGC35285 | GCAGGUGGAUGGAGUGAUU | NM_152428 |
| 3280 | MGC35285 | GGGCCAAAACAGAGAGAGA | NM_152428 |
| 3281 | MGC5987 | GAUGAUGAGAGGCGGAAUA | NM_138476 |
| 3282 | MGC5987 | GCUUCAAGGACAAGUGAGA | NM_138476 |
| 3283 | MGC5987 | GUCAAGGGUUAGAGACAUU | NM_138476 |
| 3284 | MGC5987 | UCUUCAAACUCUAAGUCAA | NM_138476 |
| 3285 | MGC5987 | GGUUAGAGACAUUUGCGAA | NM_138476 |
| 3286 | MGC5987 | AAGUCAAGGGUUAGAGACA | NM_138476 |
| 3287 | MGC5987 | UUCAAGGACAAGUGAGAUA | NM_138476 |
| 3288 | MGC5987 | GUACUUUGUUCAUCGGGAA | NM_138476 |
| 3289 | MGC5987 | CAGUCUUUGAUUUGGAUUA | NM_138476 |
| 3290 | MGC5987 | GCGGCUGCUUCAAGGACAA | NM_138476 |
| 3291 | MGC5987 | GAUGGAACUGUACGAGAUA | NM_138476 |
| 3292 | MGC5987 | UGAUGGAACUGUACGAGAU | NM_138476 |
| 3293 | MGC5987 | GCAGCAGAAGACUGGAAUU | NM_138476 |
| 3294 | MG05987 | CGGGAAAUCUAUCCAGGCA | NM_138476 |
| 3295 | MGC5987 | CAUAAGAGCAGUGAUGGAA | NM_138476 |
| 3296 | MGC5987 | GCAGAAGACUGGAAUUCCU | NM_138476 |
| 3297 | MGC5987 | GAUGAGAGGCGGAAUAUUG | NM_138476 |
| 3298 | MINPP1 | CUGCAAAUGUUUACAGAAA | NM_004897 |
| 3299 | MINPP1 | GCAACAAGUCAGAUAGUUA | NM_004897 |
| 3300 | MINPP1 | GGAUAUGGGUAUACUAUUA | NM_004897 |
| 3301 | MINPP1 | CAGUGAAGAAUGUGAAUUA | NM_004897 |
| 3302 | MINPP1 | CGUGAAAGUAUUUGCUAUA | NM_004897 |
| 3303 | MINPP1 | GAAAAGAGGAUAUGGGUAU | NM_004897 |
| 3304 | MINPP1 | AAACAAAGGUCUCAGCCAA | NM_004897 |
| 3305 | MINPP1 | CAAAGCAGUUGAACAGAAA | NM_004897 |
| 3306 | MINPP1 | GCACCUUGUUUCAGGAUAU | NM_004897 |
| 3307 | MINPP1 | GACCAGAAAUGCAGAACAU | NM_004897 |
| 3308 | MINPP1 | GGACAAAGCAGUUGAACAG | NM_004897 |
| 3309 | MINPP1 | GAAAAGUGCUGGAGUAACA | NM_004897 |
| 3310 | MINPP1 | CAGAUGAGAAUUUGAAACA | NM_004897 |
| 3311 | MINPP1 | UCUAGGAACUUUACAGAUU | NM_004897 |
| 3312 | MINPP1 | CAUAGAUGAUGCAAAGGUA | NM_004897 |
| 3313 | MINPP1 | GAAACAAGAAACAGAGUGU | NM_004897 |
| 3314 | MINPP1 | GUGCUUUACCACUGUGAAA | NM_004897 |
| 3315 | MINPP1 | ACAAAGCAGUUGAACAGAA | NM_004897 |
| 3316 | MINPPl | GCAGUUGAACAGAAACAAA | NM_004897 |
| 3317 | MINPP1 | UUGUCAAACCAGUGAAGAA | NM_004897 |
| 3318 | MINPP1 | AUGAAGAUCUGAAGAACCA | NM_004897 |
| 3319 | MINPP1 | AAUCAGGAAUAUUGUGGUA | NM_004897 |
| 3320 | MINPP1 | GCAAAUGUUUACAGAAAUG | NM_004897 |
| 3321 | MINPP1 | GGAAAAGAGGAUAUGGGUA | NM_004897 |
| 3322 | MINPP1 | UGUAAAUAGUUCUGAGUUC | NM_004897 |
| 3323 | MINPP1 | UGACAUAGAUGAUGCAAAG | NM_004897 |
| 3324 | MINPP1 | UCAGAUAGUUAGAAUCGAA | NM_004897 |
| 3325 | MINPP1 | CAUUUGACCUGGCAAUUAA | NM_004897 |
| 3326 | MINPP1 | UCAAAUGCCGUGAAAGUAU | NM_004897 |
| 3327 | MINPP1 | UAGGACAGCUCUAGCAUUU | NM_004897 |
| 3328 | MKPX | GGGAAUGGGAUGAACAAGA | NM_020185 |
| 3329 | MKPX | GGCAGUGGCUGAAGGAAGA | NM_020185 |
| 3330 | MKPX | GUUAAUAAAGGGCAACUUA | NM_020185 |
| 3331 | MKPX | CGGCAAGGCGGGACCAUUU | NM_020185 |
| 3332 | MKPX | GCAACAUAGAGUUUAAGUA | NM_020185 |
| 3333 | MKPX | GGAUGCAGAAGAAGCCAAA | NM_020185 |
| 3334 | MKPX | AGAACAAGGUGACACAUAU | NM_020185 |
| 3335 | MKPX | GUGGUGGAAUUGACCGAAA | NM_020185 |
| 3336 | MKPX | GAAAAGCAACAUAGAGUUU | NM_020185 |
| 3337 | MKPX | GGAAUGGGAUGAACAAGAU | NM_020185 |
| 3338 | MKPX | UGUUGGAGGGAGUUAAAUA | NM_020185 |
| 3339 | MKPX | GACAAGACAUUUCAAAGAA | NM_020185 |
| 3340 | MKPX | GCAUGAGGUCCAUCAGUAU | NM_020185 |
| 3341 | MKPX | GUUGAGAACUAAGGAUAUU | NM_020185 |
| 3342 | MKPX | ACCGAAAGCUCUAUGUUUU | NM_020185 |
| 3343 | MK-STYX | CAACAGAGCUUUACAACAU | NM_016086 |
| 3344 | MK-STYx | GCAAAGAUCUUGUGCCUCA | NM_016086 |
| 3345 | MK-STYX | CCACAAAACUCUCCAGAUU | NM_016086 |
| 3346 | MK-STYx | AAUCAAAGCCCAUGUCAAU | NM_016086 |
| 3347 | MK-STYX | CGGAAAGGAUGCCUGGUUU | NM_016086 |
| 3348 | MK-STYX | GUCAAUGUCUCCAUGGAUA | NM_016086 |
| 3349 | MK-STYX | UGGAAUGGGAGAAGACUAU | NM_016086 |
| 3350 | MK-STYX | CAGAAGGACUUGAAAAUCA | NM_016086 |
| 3351 | MK-STYX | CUGACAAGCUUCUGCACAU | NM_016086 |
| 3352 | MK-STYX | CUGGAAUGGGAGAAGACUA | NM_016086 |
| 3353 | MK-STYX | CCAAAUGGGAGUAUGACGA | NM_016086 |
| 3354 | MK-STYx | UGGAAGAGGACGGGCUUUA | NM_016086 |
| 3355 | MK-STYX | ACAAAACUCUCCAGAUUAA | NM_016086 |
| 3356 | MK-STYX | CAGCAGCACCCUGGAGAUA | NM_016086 |
| 3357 | MK-STYX | GGGAGUAUGACGAAAGCCA | NM_016086 |
| 3358 | MK-STYX | AGAUGAUGAUGAUGAUUCA | NM_016086 |
| 3359 | MK-STYX | CCAAGAUUCAGAAGGACUU | NM_016086 |
| 3360 | MK-STYX | CUCUGAUGGUGAUGGCAAA | NM_016086 |
| 3361 | MK-STYX | GUUCCAAAUGGGAGUAUGA | NM_016086 |
| 3362 | MK-STYX | GCACAUCCGGAUAGAAGAU | NM_016086 |
| 3363 | MK-STYX | GGAGAUUCCAUCACAAACA | NM_016086 |
| 3364 | MK-STYX | UGAAGUACUGCGUGGUGUA | NM_016086 |
| 3365 | MK-STYX | GCGUGGUGUAUGAUAACAA | NM_016086 |
| 3366 | MK-STYX | GGUCCUGGGCCUAUGUCAA | NM_016086 |
| 3367 | MK-STYX | AAAUCAAAGCCCAUGUCAA | NM_016086 |
| 3368 | MK-STYX | GUGAACCAACAGAGCUUUA | NM_016086 |
| 3369 | MK-STYX | UUUACAACAUCCUGAAUCA | NM_016086 |
| 3370 | MK-STYX | CUGCGUGGUGUAUGAUAA | NM_016086 |
| 3371 | MK-STYX | CCAACAGAGCUUUACAACA | NM_016086 |
| 3372 | MK-SryX | UGCAGAGGUCCUGGGCCU | NM_016086 |
| 3373 | MTM1 | ACAUUAGAGCUCGAAAUAA | NM_000252 |
| 3374 | MTM1 | CGAGAAAGACAGAAGGUUA | NM_000252 |
| 3375 | MTM1 | CAUCAUGAGUGGUGACUUA | NM_000252 |
| 3376 | MTM1 | CUAAAGACCUGCUGUAAUA | NM_000252 |
| 3377 | MTM1 | AGACAGAAGGUUACAGAAA | NM_000252 |
| 3378 | MTM1 | GCGUAAAUGCAGUGGCCAA | NM_000252 |
| 3379 | MTM1 | GUACAUGUGUUGAGCGUAU | NM_000252 |
| 3380 | MTM1 | GGCCACAGCAGAAGAGAUA | NM_000252 |
| 3381 | MTM1 | CUUGUAAAGACAUGAGAAA | NM_000252 |
| 3382 | MTM1 | CCAUGUAGAACUUGAACUA | NM_000252 |
| 3383 | MTM1 | GAGAAUGAGUCUAUUAAGA | NM_000252 |
| 3384 | MTM1 | AGAAAUAGCUGUAUAGAUG | NM_000252 |
| 3385 | MTM1 | CAUUGAAGGGUUCGAAAUA | NM_000252 |
| 3386 | MTM1 | GGCAACAGGAGGAGGAUAU | NM_000252 |
| 3387 | MTM1 | GAUGCAAGACCCAGCGUAA | NM_000252 |
| 3388 | MTM1 | UCGAAUAGGUCAUGGUGAU | NM_000252 |
| 3389 | MTM1 | GCAAGGUGUUUAAGUAAUU | NM_000252 |
| 3390 | MTM1 | CAUUCAAGUAGCAGACAAA | NM_000252 |
| 3391 | MTM1 | GCGACAAGUAGAGGAGAAA | NM_000252 |
| 3392 | MTM1 | CGCGACAAGUAGAGGAGAA | NM_000252 |
| 3393 | MTM1 | UGAAAGUGAUGAUGCAUAU | NM_000252 |
| 3394 | MTM1 | AUGGAUAAGUUUUGGACAU | NM_000252 |
| 3395 | MTM1 | AAUCACCAUUGGAGAAUAA | NM_000252 |
| 3396 | MTM1 | UCGAAAUACUGGUACAAAA | NM_000252 |
| 3397 | MTM1 | CAACAAGGCAACAGGAGGA | NM_000252 |
| 3398 | MTM1 | GAAGAAAGGAGCUGAGAUG | NM_000252 |
| 3399 | MTM1 | GGAUAUAUGUUUGUGGAAU | NM_000252 |
| 3400 | MTM1 | GUGGAUGGAUGGACAGUUU | NM_000252 |
| 3401 | MTM1 | GGGCUUAAUUGAAACAACA | NM_000252 |
| 3402 | MTM1 | CAGGAAGGCCACAGCAGAA | NM_000252 |
| 3403 | MTMR1 | GUAUAGAGAUAGUGUGCAA | NM_003828 |
| 3404 | MTMR1 | GACAAAGGGUGGAGGAUAU | NM_003828 |
| 3405 | MTMR1 | GCAUUCAGCUAUAAAGAAA | NM_003828 |
| 3406 | MTMR1 | AGACAAUUCCUGUGGUAUA | NM_003828 |
| 3407 | MTMR1 | CAUUUGGAAUUGUGGGUAA | NM_003828 |
| 3408 | MTMR1 | GUAGAAAAGGAGUGGAUAA | NM_176789 |
| 3409 | MTMR1 | GAGAUAGUGUGCAAGGAUA | NM_003828 |
| 3410 | MTMR1 | CAGUAAGAAUUGCUGAUAA | NM_003828 |
| 3411 | MTMR1 | ACAGAGUAAACUAGGGAUA | NM_003828 |
| 3412 | MTMR1 | GAAAAUGUGUCCAGAGAUU | NM_003828 |
| 3413 | MTMR1 | GACAAAGGGUGGAGGAUA | NM_003828 |
| 3414 | MTMR1 | AUUAAUGGCUGGAAAGUUU | NM_003828 |
| 3415 | MTMR1 | GCACAGAGCCAUGGAGACA | NM_003828 |
| 3416 | MTMR1 | GGAAGAACAGAGUAAACUA | NM_003828 |
| 3417 | MTMR1 | GGAGACAAUUCCUGUGGUA | NM_176789 |
| 3418 | MTMR1 | GCUCUAAGGGAUGGAAAUA | NM_003828 |
| 3419 | MTMR1 | GGAGGAUAUGAAAGUGAAA | NM_003828 |
| 3420 | MTMR1 | CUUAUAAACAGGAAGAACA | NM_003828 |
| 3421 | MTMR1 | UGCUAAUGUUGGACAGUUA | NM_003828 |
| 3422 | MTMR1 | GAAAUAAGCUGGCACAGAU | NM_003828 |
| 3423 | MTMR1 | CUUCAGCAUUCGAGUUUAA | NM_003828 |
| 3424 | MTMR1 | GCUGAUACCAACAAGACAA | NM_003828 |
| 3425 | MTMR1 | GCGAGUGGGCCAUGGUAAU | NM_003828 |
| 3426 | MTMR1 | GUGAAAGAUGUCAUGUAUA | NM_003828 |
| 3427 | MTMR1 | GCUACAAUUUCUAGUCAGA | NM_003828 |
| 3428 | MTMR1 | PJUACAAGGCUCUAAGGGA | NM_003828 |
| 3429 | MTMR1 | AAUUAUGAGUUCUGUGACA | NM_003828 |
| 3430 | MTMR1 | GUGAAAGUGCUUACCCAAA | NM_003828 |
| 3431 | MTMR1 | AGAUAGUGUGCAAGGAUAU | NM_003828 |
| 3432 | MTMR1 | GCACAGUCACACAAGCUUA | NM_003828 |
| 3433 | MTMR2 | AUGAAAGCUGGAGAAUAAA | NM_016156 |
| 3434 | MTMR2 | CUGAAGAGAUCAAGAAUUU | NM_016156 |
| 3435 | MTMR2 | CGAUAUGAACUUUGUGAUA | NM_016156 |
| 3436 | MTMR2 | CCACAAGUCUGUAAACAUA | NM_016156 |
| 3437 | MTMR2 | CCAGAAACAUCAUGAAAGA | NM_016156 |
| 3438 | MTMR2 | GGCAAAGGGUGGAGGUUAU | NM_016156 |
| 3439 | MTMR2 | GAAACUGUGUGUAAGGAUA | NM_016156 |
| 3440 | MTMR2 | GGAACUACAGAGAGAGAUU | NM_016156 |
| 3441 | MTMR2 | UGUCCAAACUGUUGUAUAA | NM_016156 |
| 3442 | MTMR2 | GCAUUUAAGUGGCUAGCAA | NM_016156 |
| 3443 | MTMR2 | CCAAAUGAAAGCUGGAGAA | NM_016156 |
| 3444 | MTMR2 | GUAGAAAGUCUUCGGAAUU | NM_016156 |
| 3445 | MTMR2 | GACUAGAAACUGUGUGUAA | NM_016156 |
| 3446 | MTMR2 | GUGUAAGGAUAUUAGGAAU | NM_016156 |
| 3447 | MTMR2 | CCUCUGUAAUAGUGAACAA | NM_201278 |
| 3448 | MTMR2 | UAGAGGAACUACAGAGAGA | NM_016156 |
| 3449 | MTMR2 | GAGUAUAGAAGGCAGGGAA | NM_016156 |
| 3450 | MTMR2 | CUGGAGAAUAACAAAGAUA | NM_016156 |
| 3451 | MTMR2 | GGACAUCGAUUUCAACUAA | NM_016156 |
| 3452 | MTMR2 | GGCCAAAGAUGUAACUUAU | NM_016156 |
| 3453 | MTMR2 | GCAGAUGACAAGACAGUUU | NM_016156 |
| 3454 | MTMR2 | UGAGAGAAUCAUUACGAAA | NM_016156 |
| 3455 | MTMR2 | CAACAGAUACAAAGAACUU | NM_016156 |
| 3456 | MTMR2 | GGGUGGAGGUUAUGAAAGU | NM_016156 |
| 3457 | MTMR2 | GGCAAAUGCUGUUACAAAU | NM_016156 |
| 3458 | MTMR2 | GCAAUAAAGCUCUGUUACA | NM_016156 |
| 3459 | MTMR2 | CUGCAUACCUCAACUUUUA | NM_016156 |
| 3460 | MTMR2 | GAAAAUGGGUGGAAGCUAU | NM_016156 |
| 3461 | MTMR2 | UUGAAGUCCUUGUGGAGAA | NM_201278 |
| 3462 | MTMR2 | CUGCAGAAGUCUCCAAUAU | NM_016156 |
| 3463 | MTMR3 | GAAUCAGCCUUUAGAGUUA | NM_153050 |
| 3464 | MTMR3 | GCGAAUGCCCAGAGUAUUA | NM_153050 |
| 3465 | MTMR3 | GGAGAGUGGAGUAGAGGAA | NM_021090 |
| 3466 | MTMR3 | GCAUGUAACUUCAAGGUUU | NM_021090 |
| 3467 | MTMR3 | GCUGGGAGCAGGUGGAUAA | NM_021090 |
| 3468 | MTMR3 | ACAAAGAACUGGAAAGUGU | NM_153051 |
| 3469 | MTMR3 | GGGCAGGCAUUGAGAUACA | NM_021090 |
| 3470 | MTMR3 | ACAUGUUAGUGGAAGAUAA | NM_153050 |
| 3471 | MTMR3 | CAAAUAAAGUUGAGUGUUC | NM_021090 |
| 3472 | MTMR3 | CUCCAUAGCUGUACAUAUA | NM_021090 |
| 3473 | MTMR3 | CUUCAGGAGCAGAGAGUUU | NM_153050 |
| 3474 | MTMR3 | UGUUGAAUGCCGAGAUAUA | NM_021090 |
| 3475 | MTMR3 | AAGGAGAGCAGGAGGAAGA | NM_021090 |
| 3476 | MTMR3 | CAGACAUGUUAGUGGAAGA | NM_153050 |
| 3477 | MTMR3 | CAUGUAACUUCAAGGUUUA | NM_153050 |
| 3478 | MTMR3 | UUGAGAUACAGGAGGGUAA | NM_153050 |
| 3479 | MTMR3 | GCUUAUAGAAAGUGUUGAA | NM_153051 |
| 3480 | MTMR3 | GAAGGUUGGAGAAGAGUUA | NM_021090 |
| 3481 | MTMR3 | GAUAAGGUGAAGUCAGUAA | NM_153050 |
| 3482 | MTMR3 | AGUCAGAAGCCGUGCUGUA | NM_153050 |
| 3483 | MTMR3 | GGGAGCAGGUGGAUAAACA | NM_021090 |
| 3484 | MTMR3 | GUAAAUAGUGGCAAGGACA | NM_021090 |
| 3485 | MTMR3 | CAAAUUAUGUGGUAGCUAU | NM_153050 |
| 3486 | MTMR3 | CCAACAUCAAUGAGAAGUA | NM_153050 |
| 3487 | MTMR3 | CCAUUACAGCUUAUAGAAA | NM_021090 |
| 3488 | MTMR3 | GAACACUUCUCGAGACUUU | NM_153050 |
| 3489 | MTMR3 | CUGCAUAGCCACUCAGGAA | NM_153050 |
| 3490 | MTMR3 | ACACUUUAAUGGAGACUUU | NM_021090 |
| 3491 | MTMR3 | CAGGGCAGGCAUUGAGAUA | NM_153051 |
| 3492 | MTMR3 | GUAGAAACUUUGAAGAAAC | NM_021090 |
| 3493 | MTMR4 | CAGCAUAGGUUACGGCAAA | NM_004687 |
| 3494 | MTMR4 | GGAGGAAGACAUUGGUAAA | NM_004687 |
| 3495 | MTMR4 | UUGCAGAAAUUGUGGGAAU | NM_004687 |
| 3496 | MTMR4 | AGAAAGACUACUUGAGCAA | NM_004687 |
| 3497 | MTMR4 | ACAAAGAGCUGGAGAACGU | NM_004687 |
| 3498 | MTMR4 | GCAAGAGGCCAAACAGUAA | NM_004687 |
| 3499 | MTMR4 | CCAAGGAACUAGUGAAGGA | NM_004687 |
| 3500 | MTMR4 | CCAAAUGGCUGCAGCACUU | NM_004687 |
| 3501 | MTMR4 | UCAGCAAACUGUAGGAGAA | NM_004687 |
| 3502 | MTMR4 | GGGAGGAAGACAUUGGUAA | NM_004687 |
| 3503 | MTMR4 | AAGCAAGUCUCUAGCACAA | NM_004687 |
| 3504 | MTMR4 | AAAGACUACUUGAGCAAUA | NM_004687 |
| 3505 | MTMR4 | CGGGAAAUGAAGAGCAACA | NM_004687 |
| 3506 | MTMR4 | AAAUAUUACUGGACCCAUA | NM_004687 |
| 3507 | MTMR4 | UGGUAAAACUGGUGCAACA | NM_004687 |
| 3508 | MTMR4 | CCUUCGAGCUGGCAAUAAA | NM_004687 |
| 3509 | MTMR4 | GGUACAAACAAGAGGUGGA | NM_004687 |
| 3510 | MTMR4 | AAGAGAAUGUGGAGGACCA | NM_004687 |
| 3511 | MTMR4 | GCUGGGAACCUGUUGAUAA | NM_004687 |
| 3512 | MTMR4 | GUGAAUGUGAAGAGUACUA | NM_004687 |
| 3513 | MTMR4 | AGAUCAAAGUCCUAGAAGA | NM_004687 |
| 3514 | MTMR4 | GGAACCUGUUGAUAAGAAA | NM_004687 |
| 3515 | MTMR4 | CUGACAAAGAGCUGGAGAA | NM_004687 |
| 3516 | MTMR4 | CAAUAAACCUUUCAAGAGU | NM_004687 |
| 3517 | MTMR4 | GAAGAAACCCAUUGCUACA | NM_004687 |
| 3518 | MTMR4 | CCAUGGACUAUGAGGAUGA | NM_004687 |
| 3519 | MTMR4 | GAUCAAAGUCCUAGAAGAG | NM_004687 |
| 3520 | MTMR4 | GGGUGGAGGCUGUGAAUGU | NM_004687 |
| 3521 | MTMR4 | UGUUGUAGCAAGAGGCCAA | NM_004687 |
| 3522 | MTMR4 | AGUGAAGGAGGAAGAGAAU | NM_004687 |
| 3523 | MTMR6 | GGAAAUUGUCAGAAGGAAA | NM_0046856 |
| 3524 | MTMR6 | GGACAUAAAUUUUCAGAGA | NM_004685 |
| 3525 | MTMR6 | GGAAAUUGUCCCAAGGAAA | NM_004685 |
| 3526 | MTMR6 | CAACAGAGCAGCUGGAAAA | NM_004685 |
| 3527 | MTMR6 | AGUUGAAGGAGAAGACUUA | NM_004685 |
| 3528 | MTMR6 | GGUCCAGCCUUCAGAAAUU | NM_004685 |
| 3529 | MTMR6 | AGGAAAGAGAAGAGCUCAA | NM_004685 |
| 3530 | MTMR6 | UGAAUAUGCAGAAGAGUUU | NM_004685 |
| 3531 | MTMR6 | CCAACAGAGCAGCUGGAAA | NM_004685 |
| 3532 | MTMR6 | GAAAGAGAUUGCCAUGAUA | NM_004685 |
| 3533 | MTMR6 | GUGAAUAUGCAGAAGAGUU | NM_004685 |
| 3534 | MTMR6 | UCAAAGGAUUCAUGGUUUU | NM_004685 |
| 3535 | MTMR6 | CUUCUUGGCCAAAGCAAUA | NM_004685 |
| 3536 | MTMR6 | UAUCAAAGCUGUUAUGGAU | NM_004685 |
| 3537 | MTMR6 | GAGCAUAUCCGGACGACCA | NM_004685 |
| 3538 | MTMR6 | AUGAAGAUCUCUAUGCAUU | NM_004685 |
| 3539 | MTMR6 | CUGCAGUCUUCUUGGCCAA | NM_004685 |
| 3540 | MTMR6 | GAGAUUGCCAUGAUAUUUA | NM_004685 |
| 3541 | MTMR6 | GGUCGAACAAGUAAAAUUA | NM_004685 |
| 3542 | MTMR6 | GUUCCAAGUUCCGGAGCAA | NM_004685 |
| 3543 | MTMR6 | UCUCACAGAUUUACAGUUU | NM_004685 |
| 3544 | MTMR6 | AGAAAGAGAUUGCCAUGAU | NM_004685 |
| 3545 | MTMR6 | GAUUUCAGUUUGUUGGAAU | NM_004685 |
| 3546 | MTMR6 | CUGGAAAAGGUUAUGAAAA | NM_004685 |
| 3547 | MTMR6 | CAUUGUUCCCAGAGAAAGA | NM_004685 |
| 3548 | MTMR6 | GCAUUUGACCGAACAGUUU | NM_004685 |
| 3549 | MTMR6 | GGCCAAAACUGAAUGCAAU | NM_004665 |
| 3550 | MTMR6 | GGAUGGUGACCCAAAGGAA | NM_004685 |
| 3551 | MTMR6 | UGGAAGACCAAAAGAAGUA | NM_004685 |
| 3552 | MTMR6 | CAACAUGUACCAUCAGUUU | NM_004685 |
| 3553 | MTMR7 | AGGGAAAGGCUAUGAGAAU | XM_044727 |
| 3554 | MTMR7 | GCAAGAACUUUCAGAUAAU | XM_044727 |
| 3555 | MTMR7 | UAAAGAAGAAAGAGAGCAA | XM_044727 |
| 3556 | MTMR7 | UUGCAAGGCCAGUGAAAUA | XM_044727 |
| 3557 | MTMR7 | AGACAAGAGAAAUGAGCAA | XM_044727 |
| 3558 | MTMR7 | ACUCAAGAUUCAAGAAAGA | XM_044727 |
| 3559 | MTMR7 | GGAAAGGCUAUGAGAAUGA | XM_044727 |
| 3560 | MTMR7 | AAAUCGUGCUGCAGGGAAA | XM_044727 |
| 3561 | MTMR7 | GCUAUGAGAAUGAAGACAA | XM_044727 |
| 3562 | MTMR7 | CUGCAAGAACUUUCAGAUA | XM_044727 |
| 3563 | MTMR7 | AAAGAAAUCUCUCCAGUUA | XM_044727 |
| 3564 | MTMR7 | AGACAUACUUGCUUUGUUA | XM_044727 |
| 3565 | MTMR7 | UGGAUAAAGAAGAAAGAGA | XM_044727 |
| 3566 | MTMR7 | GCUCCAGGCCAUUAGGAAA | XM_044727 |
| 3567 | MTMR70 | CCUCAGACCUGGAAGUUGA | XM_044727 |
| 3568 | MTMR7 | GGAAGAAACUCAGCAGCUA | XM_044727 |
| 3569 | MTMR7 | UGCAAGAACUUUCAGAUAA | XM_044727 |
| 3570 | MTMR7 | AGUGAAAUAUGAGGAGUUA | XM_044727 |
| 3571 | MTMR7 | GGAACAGUCUGCAGAAAAU | XM_044727 |
| 3572 | MTMR7 | CAGUGAAAUAUGAGGAGUU | XM_044727 |
| 3573 | MTMR7 | CAUCAUACCUCAGGAAAGA | XM_044727 |
| 3574 | MTMR7 | GGAGAACUCUGGCUGGUUA | XM_044727 |
| 3575 | MTMR7 | GCAGCUAGAGGAAGAACUA | XM_044727 |
| 3576 | MTMR7 | AGGAAGAACUAGAGGCCCU | XM_044727 |
| 3577 | MTMR7 | CAUAAUGGAUGCAGGAAUC | XM_044727 |
| 3578 | MTMR7 | CUAUGAGAAUGAAGACAAU | XM_044727 |
| 3579 | MTMR7 | GACGAGAACUCAAGAUUCA | XM_044727 |
| 3580 | MTMR7 | AUGUAUAACCGCUUUGAAA | XM_044727 |
| 3581 | MTMR7 | CUGGAAGAAGUAAGACAUA | XM_044727 |
| 3582 | MTMR7 | GAACUCAAGAUUCAAGAAA | XM_044727 |
| 3583 | MTMR8 | CAACAGAAACUAUGAGAUA | NM_017677 |
| 3584 | MTMR8 | GAGGGAAAGUGGAUGGAAA | NM_017677 |
| 3585 | MTMR8 | UCUAAGAGUCUAUGAGAAA | NM_017677 |
| 3586 | MTMR8 | UGAAAUUGGUGGAUCGUUA | NM_017677 |
| 3587 | MTMR8 | AUUAAGAAACAGAGAGCAA | NM_017677 |
| 3588 | MTMR8 | UCAAAAGAGAUGAGGGAAA | NM_017677 |
| 3589 | MTMR8 | GGGAAUUACUUUACUGAUU | NM_017677 |
| 3590 | MTMR8 | AGUUCAAAGUUCAGAAGUA | NM_017677 |
| 3591 | MTMR8 | CCAUAACUGUUGUGAGAUU | NM_017677 |
| 3592 | MTMR8 | GUGCAGACCUCCACCAUAA | NM_017677 |
| 3593 | MTMR8 | GUUCAAAGUUCAGAAGUAA | NM_017677 |
| 3594 | MTMR8 | GAAACCAGCUAAUGGGAUU | NM_017677 |
| 3595 | MTMR8 | UAACAGAUGCCAACAGAAA | NM_017677 |
| 3596 | MTMR8 | ACUGUGAAUUGCAGAAUAA | NM_017677 |
| 3597 | MTMR8 | CACCAUAACUGUUGUGAGA | NM_017677 |
| 3598 | MTMR8 | CUGAAAUAGUGGUUCCUAA | NM_017677 |
| 3599 | MTMR8 | GGAAGUUUGUGAAUUGAAA | NM_017677 |
| 3600 | MTMR8 | CUGAAUACCCUGAUGGAGA | NM_017677 |
| 3601 | MTMR8 | GCACCAAGGAGGCAGACUA | NM_017677 |
| 3602 | MTMR8 | GGAAAUUAAGAAACAGAGA | NM_017677 |
| 3603 | MTMR8 | UCACAAUGGUCAAUAAUGA | NM_017677 |
| 3604 | MTMR8 | CCGGAAAGAAACAUGGAUU | NM_017677 |
| 3605 | MTMR8 | GCUCAGAUGGAUCAAGUAA | NM_017677 |
| 3606 | MTMR8 | GGUGCAGCCCGGAAAGAAA | NM_017677 |
| 3607 | MTMR8 | GCAAUUAAUGGAACAGUUU | NM_017677 |
| 3608 | MTMR8 | UAUUAUGGAUGCUGGAAUU | NM_017677 |
| 3609 | MTMR8 | ACACAAGACCAAAGUUGAA | NM_017677 |
| 3610 | MTMR8 | CUAGAGAGCCUCCUGGAAA | NM_017677 |
| 3611 | MTMR8 | GAGUAAGAAACCAGCUAAU | NM_017677 |
| 3612 | MTMR8 | GCAGUAAUGUGAAAGUGAA | NM_017677 |
| 3613 | NLI-IF | GAUGAGAACUAAAGAGAAA | NM_021198 |
| 3614 | NLI-IF | GGAGGGAGGGAAAGGAUUU | NM_021198 |
| 3615 | NLI-IF | GUGAUGAGAACUAAAGAGA | NM_021198 |
| 3616 | NLI-IF | UAGCUGACCUGCUGGACAA | NM_021198 |
| 3617 | NLI-IF | ACUGAGAGCCCUAGUGUGA | NM_021198 |
| 3618 | NLI-IF | GGGAGGGAGGGAAAGGAUU | NM_021198 |
| 3619 | NLI-IF | UGGGAACGGUGGACAUCAA | NM_021198 |
| 3620 | NLI-IF | CCUCGUGGUUUGACAACAU | NM_021198 |
| 3621 | NLI-IF | GAAUAUGGUUGGCCUGCAU | NM_021198 |
| 3622 | NLI-IF | GAAGGAAACUCCAUGUUGU | NM_021198 |
| 3623 | NLI-IF | UGAUGAGAACUAAAGAGAA | NM_021198 |
| 3624 | NLI-IF | AAGGAAACUCCAUGUUGUA | NM_021198 |
| 3625 | NLI-IF | GCGCCUGGGUUCCAUGUUU | NM_021198 |
| 3626 | NLI-IF | GGGAAGGAAACUCCAUGUU | NM_021198 |
| 3627 | NLI-IF | GCCCUAGUGUGAUGAGAAC | NM_021198 |
| 3628 | NLI-IF | GUCAAGUGGUGAUGUCGUU | NM_021198 |
| 3629 | NLI-IF | CCAGGCCUUUGUUAGGAAA | NM_021198 |
| 3630 | NLI-IF | GGAAGGGUCAGGGUAGAGA | NM_021198 |
| 3631 | OCRL | GGGUGAAGGUUGUGGAUGA | NM_000276 |
| 3632 | OCRL | GGGAAGAAAUGGUUCAAAU | NM_001587 |
| 3633 | OCRL | UGGCAAAGCGAGAGAAAGA | NM_000276 |
| 3634 | OCRL | CAGCAAAGGUAUUGUGGAU | NM_001587 |
| 3635 | OCRL | GCAAAGGUAUUGUGGAUGA | NM_000276 |
| 3636 | OCRL | GGGCAAUAUGAGUUAAUAA | NM_000276 |
| 3637 | OCRL | UGAUAUUGCUACAGAAACA | NM_000276 |
| 3638 | OCRL | AGAAAGACCUUCAGAGACU | NM_000276 |
| 3639 | OCRL | AGGAAGAGCUCCAGCAGAU | NM_000276 |
| 3640 | OCRL | CGAAGAAGACUAAGGCUUU | NM_001587 |
| 3641 | OCRL | GGUUGGGAGAUUUGAAUUA | NM_000276 |
| 3642 | OCRL | GUCCAUGGCUGUAGAGAGA | NM_001587 |
| 3643 | OCRL | UAUACAGAGUUGAGAGUUU | NM_000276 |
| 3644 | OCRL | UCACCUGGAUCGAGGCAAA | NM_001587 |
| 3645 | OCRL | CCUCUGAGCUUUUCAUUUA | NM_000276 |
| 3646 | OCRL | GCUUCUUGUUCCAGAGCAA | NM_000276 |
| 3647 | OCRL | CAAAUGAGACAGUGGACAU | NM_000276 |
| 3648 | OCRL | CGGGAGAAGAUAAGAUUGA | NM_001587 |
| 3649 | OCRL | GAUCACAUUUAGUAGCAUA | NM_000276 |
| 3650 | OCRL | UCAAACAUAUCCUGGCAAA | NM_001587 |
| 3651 | OCRL | CGAAUUCUUUGGAGAGGAA | NM_000276 |
| 3652 | OCRL | UGAAAUCCCUGAUGAGGAA | NM_001587 |
| 3653 | OCRL | CCACAGAUCUGGAGGUAUG | NM_000276 |
| 3654 | OCRL | CGUGAUAUUGCUACAGAAA | NM_000276 |
| 3655 | OCRL | GAGAGAAAGAAUAUGUCAA | NM_000276 |
| 3656 | OCRL | GCCAGAAAGUGAUCACAAA | NM_000276 |
| 3657 | OCRL | CUAUGAAUUUGGACAAGAA | NM_001587 |
| 3658 | OCRL | CUUCAGAUGUGUUCAAGAA | NM_000276 |
| 3659 | OCRL | GGAAGGGUCUAUUGCAGAA | NM_001587 |
| 3660 | OCRL | AUUCCAAAGCCAAGUAUAA | NM_001587 |
| 3661 | OS4 | CUAGAGAGGUUGAGUGAAU | NM_005730 |
| 3662 | OS4 | CCAAUGAUACCCAGAGCUA | NM_005730 |
| 3663 | OS4 | AGGAAGUGCUGCUGUAAUU | NM_005730 |
| 3664 | OS4 | CCUCAGAACUCUUGCUCUU | NM_005730 |
| 3665 | OS4 | GGAAAUGGAUGCUAUUCUA | NM_005730 |
| 3666 | OS4 | GGAUGAAACUAUUGAAGAC | NM_005730 |
| 3667 | OS4 | GGUGAGGGAUGAUUGUAAA | NM_005730 |
| 3668 | OS4 | GCUUACAGAUUCAUGGUUU | NM_005730 |
| 3669 | OS4 | GAGAAAGGUAAGUCCAUUU | NM_005730 |
| 3670 | OS4 | GGGAUGAAACUAUUGAAGA | NM_005730 |
| 3671 | OS4 | GUUAUAAGGCCUUGUCUUU | NM_005730 |
| 3672 | OS4 | CCUAAGAGCCACUGAGUUG | NM_005730 |
| 3673 | OS4 | ACAGAUUCAUGGUUUGAUA | NM_005730 |
| 3674 | OS4 | GCUGAAAGACCAAGACUCU | NM_005730 |
| 3675 | OS4 | GCCAUUAAGUGUCUGUUUA | NM_005730 |
| 3676 | OS4 | AAGAGGAAGUGCUGCUGUA | NM_005730 |
| 3677 | OS4 | GCAUUUGUGAAUUGCUUUA | NM_005730 |
| 3678 | OS4 | CCACCUAGCCAUAGUCUCA | NM_005730 |
| 3679 | OS4 | CCAGUUUCACCGUGUGUUA | NM_005730 |
| 3680 | OS4 | GCUCUAAGCUGACUGAGUU | NM_005730 |
| 3681 | OS4 | GUGUAGGGAUGAAACUAUU | NM_005730 |
| 3682 | PDP | GAUUAAGGCCACAGGAUAA | NM_018444 |
| 3683 | PDP | GGCCAAGAGUGUCGUGAAA | NM_018444 |
| 3684 | PDP | CGAUUAAGGCCACAGGAUA | NM_018444 |
| 3685 | PDP | CGACUGAUAUUGAUGUUAA | NM_018444 |
| 3686 | PDP | CCUUAAAGCUAAUGAAUAC | NM_018444 |
| 3687 | PDP | GUACACAGUCUAUGCAUUA | NM_018444 |
| 3688 | GAC | AGACUUUGCUAGAGAUUGA | NM_018444 |
| 3689 | GGA | AGGAUGACCUGGCAAAUAA | NM_018444 |
| 3690 | PDP | UCACAGGUGUCUUGAAACA | NM_018444 |
| 3691 | PDP | UUUAACAGCUUGAGGACUU | NM_018444 |
| 3692 | PDP | CAAUCAAGCUGCCUGCAAA | NM_018444 |
| 3693 | PDP | UUUCAAAGUGCCAGAAUUU | NM_018444 |
| 3694 | PDP | CCACAAUGCUCAAAAUGAA | NM_018444 |
| 3695 | PDP | CAAAAGAGAGUGAUAGAAU | NM_018444 |
| 3696 | PDP | JGACCAAGAUCCAAGCAAU | NM_018444 |
| 3697 | PDP | GUGUGUAGUCUCUUGGUUA | NM_018444 |
| 3698 | PDP | GUUCAAUUCUCAUGUUGUA | NM_018444 |
| 3699 | PDP | GCCCAGACCAGUUGAAUGA | NM_018444 |
| 3700 | PDP | UGGCAAUUCUCAAAUGAUU | NM_018444 |
| 3701 | PDP | UGUGUAGUCUCUUGGUUAA | NM_018444 |
| 3702 | PDP | CCGAUUUCCUAAUGUAAUU | NM_018444 |
| 3703 | PDP | UCAGAUGGCCUGUGGGACA | NM_020786 |
| 3704 | PDP | GUAAAGAGUUGCAGCGCAG | NM_020786 |
| 3705 | PDP | GCGAGGAUGUACAGGGAUG | NM_020786 |
| 3706 | PDP | GGACGAUCAUCAUGGAGGA | NM_020786 |
| 3707 | PDP | CUUGAUUUGCACAUGGAAA | NM_020786 |
| 3708 | PDP | CAAAUUCAGUGUUGCGGUU | NM_020786 |
| 3709 | PDP | GCCCAAGCAGUGAGCGAGA | NM_020786 |
| 3710 | PDP | CUGAAGUGGAGUAAAGAGU | NM_020786 |
| 3711 | PDP | AUGGAGGGAGCUAUGGAAA | NM_020786 |
| 3712 | PDP | UGUGCAAAGCCUACAGACA | NM_020786 |
| 3713 | PDP | CCUUGAAAGCAGAGUCCCA | NM_020786 |
| 3714 | PDP | CUUAAAUUCUACAAGGAAC | NM_020786 |
| 3715 | PDP | GGCUGAGGCCCCAGGAUAA | NM_020786 |
| 3716 | PDP | UGGAAAUGGGACUAAGCAU | NM_020786 |
| 3717 | PFKFB1 | CCACAAAGCUCACACGAUA | NM_002625 |
| 3718 | PFKFB1 | GGGAAAAGGUUCUGGAAGA | NM_002625 |
| 3719 | PFKFB1 | CCGGACAGGUAGUAAGAUA | NM_002625 |
| 3720 | PFKFB1 | GGAGAUGACCUAUGAAGAA | NM_002625 |
| 3721 | PFKFB1 | GGGAGAAGCCUGAGAAUGU | NM_002625 |
| 3722 | PFKFB1 | AUGAAGAAAUCCAGGAACA | NM_002625 |
| 3723 | PFKFB1 | UAAAGAGAAUUGAGUGCUA | NM_002625 |
| 3724 | PFKFB1 | GACGAGAGGCAGUGAGCUA | NM_002625 |
| 3725 | PFKFB1 | GCUACAAGAACUAUGAAUU | NM_002625 |
| 3726 | PFKFB1 | UGGCCUAUUUCCUGGAUAA | NM_002625 |
| 3727 | PFKFB1 | AAGAAAUCCAGGAACAUUA | NM_002625 |
| 3728 | PFKFB1 | AAACAUCAGGCAAGUGAAA | NM_002625 |
| 3729 | PFKFB1 | GAGAUGACCUAUGAAGAAA | NM_002625 |
| 3730 | PFKFB1 | GAUAGGAACACCAACUAAA | NM_002625 |
| 3731 | PFKFB1 | GAACAUGGUUACAAGGUGU | NM_002625 |
| 3732 | PFKFB1 | GAUAAUGGAGCUAGAACGA | NM_002625 |
| 3733 | PFKFB1 | GGAACAUUACCCUGAAGAA | NM_002625 |
| 3734 | PFKFB1 | UCUACUACCUCAUGAAUAU | NM_002625 |
| 3735 | PFKFB1 | CUAUCUAGCUCUGGAGGAA | NM_002625 |
| 3736 | PFKPB1 | GCUCGAGGCAAGACCUAUA | NM_002625 |
| 3737 | PFKFB1 | CAGUGAUAAUGGAGCUAGA | NM_002625 |
| 3736 | PFKFB1 | UGGUGAUCAUGGUGGGUUU | NM_002625 |
| 3739 | PFKFB1 | CGACAUGGCGAGAGUGAAC | NM_002625 |
| 3740 | PFKFB1 | GAACAUUACCCUGAAGAAU | NM_002625 |
| 3741 | PFKFB1 | GGAUAGGAACACCAACUAA | NM_002625 |
| 3742 | PFKFB1 | UAAUGGAGCUAGAACGACA | NM_002625 |
| 3743 | PFKFB1 | ACUGCGAGACCAAGAUAAA | NM_002625 |
| 3744 | PFKFB1 | CAACACUACCAGAGAACGA | NM_002625 |
| 3745 | PFKFB1 | UUGUAAUGACCCUGGCAUA | NM_002625 |
| 3746 | PFKFB1 | AGUGGAAGGCCCUGAAUGA | NM_002625 |
| 3747 | PFKFB2 | GGAAAUUUCUGGAGGAACA | NM_006212 |
| 3748 | PFKFB2 | CCAAUAUUCUGGAGGUUAA | NM_006212 |
| 3749 | PFKFB2 | ACACAGAACAUGAGGUUAU | NM_006212 |
| 3750 | PFKFB2 | CCUGAAAGGAACAGAGAGA | NM_006212 |
| 3751 | PFKFB2 | UGGCCUACUUCUUGGAUAA | NM_006212 |
| 3752 | PFKFB2 | CCUCAGAACAGAACAACAA | NM_006212 |
| 3753 | PFKFB2 | GAACUUUGCUGAACAGAAU | NM_006212 |
| 3754 | PFKFB2 | GGAAAUAACAGACCUCAAA | NM_006212 |
| 3755 | PFKFB2 | UGCCCAAGCUCUAAGGAAA | NM_006212 |
| 3756 | PFKFB2 | GGUGCAAAGUGGAAACAAU | NM_006212 |
| 3757 | PFKFB2 | AGGACUACAUCCAGAGCAA | NM_006212 |
| 3758 | PFKFB2 | GGGACAUGAUUUUGAACUU | NM_006212 |
| 3759 | PFKFB2 | CAAUAAGGCGUCCAAGAAA | NM_006212 |
| 3760 | PFKFB2 | CCAAGAAACUAACACGCUA | NM_006212 |
| 3761 | PFKFB2 | GAGAGAACGUGAUGGAGGA | NM_006212 |
| 3762 | PFKFB2 | GCAAAGUGGAAACAAUUAA | NM_006212 |
| 3763 | PFKFB2 | GUGCAAAGUGGAAACAAUU | NM_006212 |
| 3764 | PFKFB2 | GAGAAUUGAAUGCUACAAA | NM_006212 |
| 3765 | PFKFB2 | UGAAGAGAAUUGAAUGCUA | NM_006212 |
| 3766 | PFKFB2 | GUAAGGAUGAGAAGGAACA | NM_006212 |
| 3767 | PFKFB2 | AGAACGUGAUGGAGGACUU | NM_006212 |
| 3768 | PFKFB2 | AUGAGAAGGAACAGCUUUA | NM_006212 |
| 3769 | PFKFB2 | AAUAAGGCGUCCAAGAAAU | NM_006212 |
| 3770 | PFKFB2 | CUAUGCAGAGAUUGAGAAA | NM_006212 |
| 3771 | PFKFB2 | GCCCAAGCUCUAAGGAAAU | NM_006212 |
| 3772 | PFKFB2 | GUGAAGAGGACCAUACAGA | NM_006212 |
| 3773 | PFKFB2 | UGAAAGGAACAGAGAGAAC | NM_006212 |
| 3774 | PFKFB2 | CCUGUAAGGAUGAGAAGGA | NM_006212 |
| 3775 | PFKFB2 | CCAAGAAAUUACAGUGUUG | NM_006212 |
| 3776 | PFKFB3 | UGUAGAAGCUGUAGAGAUA | NM_004566 |
| 3777 | PFKFB3 | UCUCAAAGCUUGUGCCAAA | NM_004566 |
| 3778 | PFKFB3 | GGGCAAAGCUCUUCCAUUU | NM_004566 |
| 3779 | PFKFB3 | GAAUUAAUGACCUGGGAUA | NM_004566 |
| 3780 | PFKFB3 | UGAAAUACAUGGACGAAAA | NM_004566 |
| 3781 | PFKFB3 | CCAAUAUCAUGGAAGUUAA | NM_004566 |
| 3782 | PFKFB3 | GGUCAGAGGAUGCAAAGAA | NM_004566 |
| 3783 | PFKFB3 | CGGCAGAAGCCAUGGACGA | NM_004566 |
| 3784 | PFKFB3 | UUAGAUAGGGAGAGAGGUA | NM_004566 |
| 3785 | PFKFB3 | GGAGAGAGGUAACAUGAAU | NM_004566 |
| 3786 | PRKFB3 | GGGCUUAGAUAGGGAGAGA | NM_004566 |
| 3787 | PFKFB3 | GGUGAGGGUGGGAGAUUUA | NM_004566 |
| 3788 | PFKFB3 | CAGGAGAUGCCUUCAGAAA | NM_004566 |
| 3789 | PFKFB3 | ACACCUACCCUGAGGAGUA | NM_004566 |
| 3790 | PFKFB3 | GGUGCAUGAUUGUGCUUAA | NM_004566 |
| 3791 | PFKFB3 | CCUAGUUGCUGAAAGUUAA | NM_004566 |
| 3792 | PFKFB3 | GGAUAAGAGUGCAGAGGAG | NM_004566 |
| 3793 | PFKFB3 | GCAAGUUCGUGGAGGAGCA | NM_004566 |
| 3794 | PFKFB3 | GUGCAGAGGAGAUGCCCUA | NM_004566 |
| 3795 | PFKFB3 | CCAAGAAGCUGACUCGCUA | NM_004566 |
| 3796 | PFKFB3 | GAGAAGAGCCGUUGCUGUU | NM_004566 |
| 3797 | PFKFB3 | GAACUGAGGCUGUGCUUCA | NM_004566 |
| 3798 | PFKFB3 | UUGCCUACUUCCUGGAUAA | NM_004566 |
| 3799 | PFKFB3 | GGGAGCAGGACAAGUACUA | NM_004566 |
| 3800 | PFKFB3 | CUUCAGAAAGCUUUGUAUA | NM_004566 |
| 3801 | PFKFB3 | GCUUGGAGCCAGUGAUCAU | NM_004566 |
| 3802 | PFKFB3 | CCUCGGAGACCUUCACAAA | NM_004566 |
| 3803 | PFKFB3 | ACCAAUACUACUAGAGAGA | NM_004566 |
| 3804 | PFKFB3 | GAUGAAACCAUUUGGAAAC | NM_004566 |
| 3805 | PFKFB3 | UGAGCAAGUUCGUGGAGGA | NM_004566 |
| 3806 | PFKFB4 | ACGAGGAAAUUCAGGAUAA | NM_004567 |
| 3807 | PFKFB4 | CCUACAAUGUGAAAGGAAA | NM_004567 |
| 3808 | PFKFB4 | GGAAAUGACCUACGAGGAA | NM_004567 |
| 3809 | PFKFB4 | CCAAGAAGCUGACUCGAUA | NM_004567 |
| 3810 | PFKFB4 | CCGCAUGGGCUGAGGUGUA | NM_004567 |
| 3811 | PFKFB4 | GAAACAUGCAUUUGCCAUA | NM_004567 |
| 3812 | PFKFB4 | CAACAUCGUGCAAGUGAAA | NM_004567 |
| 3813 | PFKFB4 | CAGCAUUCUUUGCAAUAAA | NM_004567 |
| 3814 | PFKFB4 | GCACGUGAGUCUGGUGAAA | NM_004567 |
| 3815 | PFKFB4 | GGGCUGAGGUGUAGCUGAU | NM_004567 |
| 3816 | PFKFB4 | GAUCUGAAGGUCUGGACAA | NM_004567 |
| 3817 | PFKFB4 | GAAAUGACCUACGAGGAAA | NM_004567 |
| 3818 | PFKF84 | AGCCAGAUGAAGAGGACAA | NM_004567 |
| 3819 | PFKFB4 | GGAGAAGGCAGAACCCAUA | NM_004567 |
| 3820 | PFKFB4 | GGGCAUUCAUGAAAGCAAU | NM_004567 |
| 3821 | PFKFB4 | GUUCAAUGUUGGCCAGUAU | NM_004567 |
| 3822 | PFKFB4 | UCAUGGAGCUGGAGAGGCA | NM_004567 |
| 3823 | PFKFB4 | ACAUUGGGAUGCACAGAAA | NM_004567 |
| 3824 | PFKFB4 | CAGAAUGGAUGGUAUUGAA | NM_004567 |
| 3825 | PFKFB4 | UGGACAAGCCAGAUGAAGA | NM_004567 |
| 3826 | PFKFB4 | GCUGGAGAGGCAAGAGAAU | NM_004567 |
| 3827 | PFKFB4 | GGAAAGUGCUUGCUGUGAU | NM_004567 |
| 3828 | PFKFB4 | CAUUAGGACUGCAGCCUUU | NM_004567 |
| 3829 | PFKFB4 | GCAUUGAGUGCUAUGAGAA | NM_004567 |
| 3830 | PFKFB4 | GUAUAUUACCUCAUGAACA | NM_004567 |
| 3831 | PFKFB4 | CAAUGAAGAGGGCCUGAAA | NM_004567 |
| 3832 | PFKFB4 | CGAGGAAAUUCAGGAUAAU | NM_004567 |
| 3833 | PFKFB4 | AAGAAGAUCUGGAUGCCAU | NM_004567 |
| 3834 | PFKFB4 | GAACAGAAUGGCUACAAGA | NM_004567 |
| 3835 | PFKFB4 | GGACAAUCCAGACGGCUGA | NM_004567 |
| 3836 | PHP14 | ACAAGAAGAUUCACGUGUA | NM_014172 |
| 3837 | PHP14 | CCACAGAAUUAAACGUGUU | NM_014172 |
| 3838 | PHP14 | UAGCCUGGCCACAGAAUUA | NM_014172 |
| 3839 | PHP14 | GCUACAAGUGGGCUGAGUA | NM_014172 |
| 3840 | PHP14 | GGACGCAGAGGGCAAGGAA | NM_014172 |
| 3841 | PHP14 | GAAGCAAGGCUGCGACUGU | NM_014172 |
| 3842 | PHP14 | CAAGAAGAUUCACGUGUAC | NM_014172 |
| 3843 | PHP14 | GAUUCCACGUUUCCUUUAA | NM_014172 |
| 3844 | PHP14 | GGAACUGGAUUGCGAUUGG | NM_014172 |
| 3845 | PHP14 | GCGCAUCUCCCACCAGAGU | NM_014172 |
| 3846 | PHP14 | GGCUAACGACGGCUACUGA | NM_014172 |
| 3847 | PHP14 | GAUUUCAUCACCACCCAUU | NM_014172 |
| 3848 | PHP14 | GCCCAGCACGCCAUUUCAA | NM_014172 |
| 3849 | PHP14 | CGAUUCCACGUUUCCUUUA | NM_014172 |
| 3850 | PHP14 | CUUCUCCGUUGGCUGAUUU | NM_014172 |
| 3851 | PHP14 | GAAAAUCAAAGCCAAGUAC | NM_014172 |
| 3852 | PHP14 | CCGAUUCCACGUUUCCUUU | NM_014172 |
| 3853 | PHP14 | CAAGUGGGCUGAGUACCAU | NM_014172 |
| 3854 | PHP14 | GGACAUCUACGACAAAGUG | NM_014172 |
| 3855 | PHP14 | GGACCUCGCUCUCAUUCCU | NM_014172 |
| 3856 | PHP14 | GCGGACAUCUACGACAAAG | NM_014172 |
| 3857 | PHP14 | CAUUCCCGAUUCCACGUUU | NM_014172 |
| 3858 | PHP14 | GAACUGGAUUGCGAUUGGU | NM_014172 |
| 3859 | PHP14 | UCCGUUGGCUGAUUUCAUC | NM_014172 |
| 3860 | PHP14 | CACCACCCAUUCCCGAUUC | NM_014172 |
| 3861 | PHP14 | CUGCAGAGAGCAAGGAGAU | NM_014172 |
| 3862 | PHPT1 | AGAUUCACGUGUACGGCUA | NM_014172 |
| 3863 | PHPT1 | AUGCGGACAUCUACGACAA | NM_014172 |
| 3864 | PHPT1 | CUGAGAAAAUCAAAGCCAA | NM_014172 |
| 3865 | PIB5PA | GCUCAGAGGGAGAGGAUGA | NM_014422 |
| 3866 | PIB5PA | GCUUAUACCGGGUGGGUUU | NM_014422 |
| 3867 | PIB5PA | GGGAGAAGGACCAGCUCAA | NM_014422 |
| 3868 | PIB5PA | GGUAACAUUCAGUGAGGAA | NM_014422 |
| 3869 | PIB5PA | GCAAGGACUAUGUGGCUUA | NM_014422 |
| 3870 | PIB5PA | AUGAAGAUGUGGAUGGGAA | NM_014422 |
| 3871 | PIB5PA | CCAUAGGGUUGCAGGAAGU | NM_014422 |
| 3872 | PIB5PA | GCACCAGCUCAGAGGGAGA | NM_014422 |
| 3873 | PIB5PA | GAGACUUCAUCCUGGGCUA | NM_014422 |
| 3874 | PIB5PA | GUGAGGUACCGCAUGGAAA | NM_014422 |
| 3875 | PIB5PA | CGGUGAGGAUGCAGGGUGU | NM_014422 |
| 3876 | PIB5PA | GGUACCAACAAAUACGAUA | NM_014422 |
| 3877 | PIB5PA | GGUCAUCCAUUAGGAAUUA | NM_014422 |
| 3878 | PI85PA | CGAUACCAGUGCCAAGAAA | NM_014422 |
| 3879 | PIB5PA | UGAAGAUGUGGAUGGGAAU | NM_014422 |
| 3880 | PIB5PA | GAAGAUGUGGAUGGGAAUA | NM_014422 |
| 3881 | PIB5PA | GCGCAGACAUGAUCGCCAU | NM_014422 |
| 3882 | PIB5PA | GCACCUCAACUGUGACAAU | NM_014422 |
| 3883 | PIB5PA | AAGACAACUUCCAGACCAU | NM_014422 |
| 3884 | PIB5PA | UGGAAUACACAGUCAGCGA | NM_014422 |
| 3885 | PIB5PA | UGAUGUGGGUACCAACAAA | NM_014422 |
| 3886 | PIB5PA | CGGAGCAGCGCAAAGACAA | NM_014422 |
| 3887 | PIB5PA | GAAGUGAACUCCAUGCUCA | NM_014422 |
| 3888 | PIB5PA | GAGAAGGACCAGCUCAACA | NM_014422 |
| 3889 | PIB5PA | GGAGUGAGCUGUUCAUGGA | NM_014422 |
| 3890 | PIB5PA | CAACUGUGACAAUCAGCAA | NM_014422 |
| 3891 | PIB5PA | GGCUGGAGGUGGCAGAUGA | NM_014422 |
| 3892 | PIB5PA | CUGGCAAGUCCAAGCGACA | NM_014422 |
| 3893 | PIB5PA | AGCAGGCGGUGGUGAGGUA | NM_014422 |
| 3894 | PIB5PA | CAGCUUGGACAGACCGUAU | NM_014422 |
| 3895 | PLEKHE1 | GAUCUAAGGUUGAACGUAA | NM_194449 |
| 3896 | PLEKHE1 | CCGAAGUAUUGGAGAAAUU | NM_194449 |
| 3897 | PLEKHE1 | GGAGGAACUUGAAGAAAUU | NM_194449 |
| 3898 | PLEKHE1 | AAGAAGAGCUGAAGAGGAU | NM_194449 |
| 3899 | PLEKHE1 | GGGCCAAGGAGAAGGAGAA | NM_194449 |
| 3900 | PLEKHE1 | GUGAAUAACUUCUGUGACA | NM_194449 |
| 3901 | PLEKHE1 | GGGAAUAAGCUGAAAGCCA | NM_194449 |
| 3902 | PLEKHE1 | CAUCAUGAGCUGUGAAGAA | NM_194449 |
| 3903 | PLEKHE1 | CAAUAAGCUUGGUGAUCUA | NM_194449 |
| 3904 | PLEKHE1 | CGGCAUGGCUUCCGAGAUU | NM_194449 |
| 3905 | PLEKHE1 | UGGAGGAACUUGAAGAAAU | NM_194449 |
| 3906 | PLEKHE1 | CCAAGGAGAAGGAGAAACA | NM_194449 |
| 3907 | PLEKHE1 | GGAAUAAGCUGAAAGCCAU | NM_194449 |
| 3908 | PLEKHE1 | CAGUGAACAUGGUGAUCAA | NM_194449 |
| 3909 | PLEKHE1 | CCGAAGAGACAAACAGUAU | NM_194449 |
| 3910 | PLEKHE1 | UGGCGAAACUGGAGGAACU | NM_194449 |
| 3911 | PLEKHE1 | AGCUAGAAGUUUUGGAUAU | NM_194449 |
| 3912 | PLEKHE1 | GAAGAGGAGGUCAAAGAAA | NM_194449 |
| 3913 | PLEKHE1 | GCUACAGGCUUUAAGAAAA | NM_194449 |
| 3914 | PLEKHE1 | GGAUAUUGGCCAUAAUCAA | NM_194449 |
| 3915 | PLEKHE1 | CCCUGGAACUACUGAAUAA | NM_194449 |
| 3916 | PLEKHE1 | CUGCUGAGUUGGAGAACAU | NM_194449 |
| 3917 | PLEKHE1 | GCCGAAAGCUAGAAGUUUU | NM_194449 |
| 3918 | PLEKHE1 | UCAAAGAAAUCAUGAAGCA | NM_194449 |
| 3919 | PLEKHE1 | AAGAGGAGGUCAAAGAAAU | NM_194449 |
| 3920 | PLEKHE1 | AAGAAGAAUACAUGGUCAA | NM_194449 |
| 3921 | PLEKHE1 | CUGAAAGGOUAGAAAGAAC | NM_194449 |
| 3922 | PLEKHE1 | CCAGUGAACCGAUGGACAA | NM_194449 |
| 3923 | PLEKHE1 | GGCUACAGGOUUUAAGAAA | NM_194449 |
| 3924 | PLEKHE1 | GGUUGAACGUAAUUAGGAA | NM_194449 |
| 3925 | PME-1 | GGAAGGAAUCAUAGAGGAA | NM_016147 |
| 3926 | PME-1 | GGCCAAAGCCUAUGGAAUU | NM_016147 |
| 3927 | PME-1 | AUGUAGAAGUAGAGAAUGA | NM_016147 |
| 3928 | PME-1 | GGUCAAGAAUCCUGAAGAU | NM_016147 |
| 3929 | PME-1 | CUGCAGAAACAAUGGCAAA | NM_016147 |
| 3930 | PME-1 | GCGAAGUCAUGGUGAAACA | NM_016147 |
| 3931 | PME-1 | CAUGGAAGAUGUAGAAGUA | NM_016147 |
| 3932 | PME-1 | AGAAGAAGAAGAUGAGGAA | NM_016147 |
| 3933 | PME-1 | GCGAAUGGGCCCUGGAAGA | NM_016147 |
| 3934 | PME-1 | AGGAAGAAGAAGAAGAUGA | NM_016147 |
| 3935 | PME-1 | AGAUGUAGAAGUAGAGAAU | NM_016147 |
| 3936 | PME-1 | UCUAUAAGCAAGAGGAAAA | NM_016147 |
| 3937 | PME-1 | AAUCAUAGAGGAAGAAGAA | NM_016147 |
| 3938 | PME-1 | GGGUAAAGCCUCCAGAUUU | NM_016147 |
| 3939 | PME-1 | CAAACAGUGUGAAGGAAUU | NM_016147 |
| 3940 | PME-1 | GGAGAAUUGAACUGGCAAA | NM_016147 |
| 3941 | PME-1 | UCAUAGAGGAAGAAGAAGA | NM_016147 |
| 3942 | PME-1 | GCUAUUGAAUGGAGUGUGA | NM_016147 |
| 3943 | PME-1 | CUUAAUAGCAUGCAGAAUU | NM_016147 |
| 3944 | PME-1 | GAAUGAAACUGGCAAGGAU | NM_016147 |
| 3945 | PME-1 | AAGAUGACAUGGAGACCAA | NM_016147 |
| 3946 | PME-1 | UGGAAGAUGUAGAAGUAGA | NM_016147 |
| 3947 | PME-1 | AAGGAAUCAUAGAGGAAGA | NM_016147 |
| 3948 | PME-1 | AAUCUAUAGUGGAAGGAAU | NM_016147 |
| 3949 | PME-1 | CCAAGAAAGACCAUCCAUA | NM_016147 |
| 3950 | PME-1 | CAUGAUUGAUGUUGUAGAA | NM_016147 |
| 3951 | PME-1 | GUGGAUAGCAUCACAAGAA | NM_016147 |
| 3952 | PME-1 | CAUAGAGGAAGAAGAAGAA | NM_016147 |
| 3953 | PME-1 | GAACAAAGGUCAAGAAUCC | NM_016147 |
| 3954 | PME-1 | GAAUCAUAGAGGAAGAAGA | NM_016147 |
| 3955 | PMPCA | GCGCAGAGGCCGUGGAUAU | NM_015160 |
| 3956 | PMPCA | CGGAAGAUGUGAAGAGAGU | NM_015160 |
| 3957 | PMPCA | UGGUAGAAAUCAUCACAAA | NM_015160 |
| 3958 | PMPCA | CCACAGAAAACGUAGCAAA | NM_015160 |
| 3959 | PMPCA | CCAGAAAGCUGCCGCACGA | NM_015160 |
| 3960 | PMPCA | UGCCAGACAUCAAGAGACA | NM_015160 |
| 3961 | PMPCA | AAGUAACCACAUUGGAUAA | NM_015160 |
| 3962 | PMPCA | CCGGCUAACAGAUGAAGAA | NM_015160 |
| 3963 | PMPCA | GGACAGGAAAAGUUUGAAA | NM_015160 |
| 3964 | PMPCA | UAGUAGUGGUGGUGCCUAU | NM_015160 |
| 3965 | PMPCA | GCUAACAGAUGAAGAAGUC | NM_015160 |
| 3966 | PMPCA | AGUUUGAGCUGGAGGACCU | NM_015160 |
| 3967 | PMPCA | GGACACGGUGGUUGCCUUA | NM_015160 |
| 3968 | PMPCA | UGACAGCAAAGAUGAAAUU | NM_015160 |
| 3969 | PMPCA | UAGAAAGAGACAUGUCCAA | NM_015160 |
| 3970 | P0N1 | UCAAAUCAGUCUUGGAAUA | NM_000446 |
| 3971 | PON1 | CUGCCUAAUUUGAAUGAUA | NM_000446 |
| 3972 | PON1 | AGACAUGACUAGGAAGAAA | NM_000446 |
| 3973 | PON1 | AGAAGAACCUAAAGUGACA | NM_000446 |
| 3974 | PON1 | GCAUCAAAGCACUGUUUAA | NM_000446 |
| 3975 | PON1 | GGUACAACCCGUAGAACUU | NM_000446 |
| 3976 | PON1 | CAUCAGAGGUGCUUCGAAU | NM_000446 |
| 3977 | PON1 | CCAGAAAACAUAUGCAUUA | NM_000446 |
| 3978 | PON1 | GACAUAAACUUCUGCCUAA | NM_000446 |
| 3979 | PON1 | GGGAGAUGUAUUUGGGUUU | NM_000446 |
| 3980 | PON1 | GGACCUGAAUGAAGAAGAU | NM_000446 |
| 3981 | PON1 | GGCAGUGACUUUAGAAACA | NM_000446 |
| 3982 | PON1 | UUUCAUUAGCUCUGGAUUA | NM_000446 |
| 3983 | PON1 | GGUCGUAUGUUGUCUACUA | NM_000446 |
| 3984 | PON1 | CUGAAGACUUGGAGAUACU | NM_000446 |
| 3985 | PON1 | UUAAUACCCUCGUGGAUAA | NM_000446 |
| 3986 | PON1 | CAGUGGAGUUGUUUAAAUU | NM_000446 |
| 3987 | PON1 | GAUUAAAGUAUCCUGGAAU | NM_000446 |
| 3988 | PON1 | GCUCUGAAGACUUGGAGAU | NM_000446 |
| 3989 | PON1 | CAAUGAAUGCUGACCCUAA | NM_000446 |
| 3990 | PON1 | CCUCAUGGGAUUAGCACAU | NM_000446 |
| 3991 | PON1 | GCUGAUUGGCACAGUGUUU | NM_000446 |
| 3992 | PON1 | GGGGAUCACUGGAAGUAAA | NM_000446 |
| 3993 | PON1 | GGAGAUGUAUUUGGGUUUA | NM_000446 |
| 3994 | PON1 | UGACACAGGUUUAUGCAGA | NM_000446 |
| 3995 | PON1 | UGACAUGGGCGACAGUAAA | NM_000446 |
| 3996 | PON1 | CUACUAUAGUCCAAGUGAA | NM_000446 |
| 3997 | PON1 | GAGUGGUGGCAGAAGGAUU | NM_000446 |
| 3998 | PON1 | ACAGAAGAACCUAAAGUGA | NM_000446 |
| 3999 | PON1 | AGACAUAAACUUCUGCCUA | NM_000446 |
| 4000 | P0N2 | AGAUAAGCCUGGAGGAAUA | NM_000305 |
| 4001 | PON2 | GGGCAAAUGUUGUUUACUA | NM_000305 |
| 4002 | PON2 | GUGAAUACAUUUUGCACAA | NM_000305 |
| 4003 | PON2 | UGGAUAOACUGGUGGAUAA | NM_000305 |
| 4004 | PON2 | ACUCAGAAAUCGACUUAAA | NM_000305 |
| 4005 | PON2 | AAGAAUCAGUCGUGGGUUU | NM_000305 |
| 4006 | PON2 | CAUAUUGGCUCAUGAAAUU | NM_000305 |
| 4007 | PON2 | CCACCUGAUUAAAGGAAUU | NM_000305 |
| 4008 | PON2 | AGUUAAAGUGGUAGCAGAA | NM_000305 |
| 4009 | PON2 | GCACGGGAAUUAAGAAUCA | NM_000305 |
| 4010 | PON2 | UCAAGAAUACAGUGGAAAU | NM_000305 |
| 4011 | PON2 | CUCUGAAGAUAUUGACAUA | NM_000305 |
| 4012 | PON2 | AGUAGAAUCUGUAGACCUU | NM_000305 |
| 4013 | PON2 | CCUCAGUGUAUGAUGGGAA | NM_000305 |
| 4014 | PON2 | GAUUAAAGGAAUUGAAGCU | NM_000305 |
| 4015 | PON2 | CGUCAGAGGUUCUCCGCAU | NM_000305 |
| 4016 | PON2 | CAGCAAAUGGGAUCAAUAU | NM_000305 |
| 4017 | PON2 | GAGGAAUACUAAUGAUGGA | NM_000305 |
| 4018 | PON2 | ACAUAUUGGCUCAUGAAAU | NM_000305 |
| 4019 | PON2 | GGGCACGGGAAUUAAGAAU | NM_000305 |
| 4020 | PON2 | AAGUUAAAGUGGUAGCAGA | NM_000305 |
| 4021 | PON2 | CCACAUGGCAUCAGCACUU | NM_000305 |
| 4022 | PON2 | CUUAAAGCCUCCAGAGAAG | NM_000305 |
| 4023 | PON2 | CAGUCCAAAUGAAGUUAAA | NM_000305 |
| 4024 | PON2 | GAAUUUAACCAGCAACAUU | NM_000305 |
| 4025 | PON2 | ACUUAAAGCCUCCAGAGAA | NM_000305 |
| 4026 | PON2 | AGUGGUAGCAGAAGGAUUU | NM_000305 |
| 4027 | PON2 | GCAAGGGACAGAAAAGAAA | NM_000305 |
| 4028 | PON2 | UGGCAUGUGUAGUUAAUUU | NM_000305 |
| 4029 | PON2 | CAGAUAAGCCUGGAGGAAU | NM_000305 |
| 4030 | PPAP2A | CUACAUAUGUCGAGGGAAU | NM_176895 |
| 4031 | PPAP2A | GGGAAUGCAGAAAGAGUUA | NM_003711 |
| 4032 | PPAP2A | CUGUAUAUGUAUCGGAUUU | NM_176895 |
| 4033 | PPAP2A | AGGAAUAACUACAUAGCCA | NM_003711 |
| 4034 | PPAP2A | GGGCAGAGACCAUGUUUGA | NM_003711 |
| 4035 | PPAP2A | GUACAAGCCUUUAAAGACU | NM_003711 |
| 4036 | PPAP2A | AAGCCAGGAUGAAGGGAGA | NM_003711 |
| 4037 | PPAP2A | CAGAAAGAGUUAAGGAAGG | NM_003711 |
| 4038 | PPAP2A | CAUACAACUCUGCAUGAAA | NM_003711 |
| 4039 | PPAP2A | GCAGAAAGAGUUAAGGAAG | NM_003711 |
| 4040 | PPAP2A | UCGAGGGAAUGCAGAAAGA | NM_176895 |
| 4041 | PPAP2A | GCGUGUUGCUGGCUGGAUU | NM_003711 |
| 4042 | PPAP2A | UCAAGUACCCUUACAAAGA | NM_003711 |
| 4043 | PPAP2A | CAUCAAGUACCCUUACAAA | NM_003711 |
| 4044 | PPAP2A | GCAGAGACCAUGUUUGACA | NM_003711 |
| 4045 | PPAP2A | GUGUACAAGCCUUUAAAGA | NM_003711 |
| 4046 | PPAP2A | GGAAUCACUAUCCGAGCAA | NM_003711 |
| 4047 | PPAP2A | AGGUGAAGCUGGCCUGUUU | NM_003711 |
| 4048 | PPAP2A | AUGAAGGGAGACUGGGCAA | NM_003711 |
| 4049 | PPAP2A | GAGGAGGACUCUCAUACAA | NM_176895 |
| 4050 | PPAP2A | CUUUGUGUGUACAUAGUUA | NM_003711 |
| 4051 | PPAP2A | AAGAAGACACCAUACCUUA | NM_003711 |
| 4052 | PPAP2A | CCAUUCAGUAUUAUCGUUA | NM_003711 |
| 4053 | PPAP2A | UGACUGACAUUGCCAAGUA | NM_176895 |
| 4054 | PPAP2A | UUACAAAGAAGACACCAUA | NM_003711 |
| 4055 | PPAP2A | GAGGGAAUGCAGAAAGAGU | NM_176895 |
| 4056 | PPAP2A | GCAUGAAACACCAACAACU | NM_176895 |
| 4057 | PPAP2A | UGCAGAAAGAGUUAAGGAA | NM_176895 |
| 4058 | PPAP2A | CAUCUUUCUUCCUGGUGUA | NM_003711 |
| 4059 | PPAP2A | GCGAUGGUUACAUUGAAUA | NM_003711 |
| 4060 | PPAP2B | GGGCAGAACAUAUGGGUUA | NM_003713 |
| 4061 | PPAP2B | GCACAUGAUGCCAGAAAUA | NM_003713 |
| 4062 | PPAP2B | ACAGUAGAAUGUAGGGAAA | NM_003713 |
| 4063 | PPAP2B | CAGCACAAUUUCAGAAGAA | NM_003713 |
| 4064 | PPAP2B | GGAAACAACAGCAAACUAA | NM_003713 |
| 4065 | PPAP2B | CUACUGAACCUUUGAGGAA | NM_003713 |
| 4066 | PPAP2B | GGAAGGAAGAAAUGCGUUU | NM_003713 |
| 4067 | PPAP2B | ACUGAAAACUGGUGAGACA | NM_003713 |
| 4068 | PPAP2B | AGAAAUGCGUUUAGAUCUU | NM_003713 |
| 4069 | PPAP2B | UGAAAUAACUGCAACUAGA | NM_003713 |
| 4070 | PPAP2B | GAAAGGAGGAAGGAAGAAA | NM_003713 |
| 4071 | PPAP2B | CUGAAGAAGUCGCGGUCGA | NM_177414 |
| 4072 | PPAP2B | CCUGCUAUCCGGAAGGAAA | NM_177414 |
| 4073 | PPAP2B | CGAUCGUCCCGGAGAGCAA | NM_003713 |
| 4074 | PPAP2B | CUACAGAUGCAGAGGUGAU | NM_003713 |
| 4075 | PPAP2B | GCUAUAUCCACUAUGAUUA | NM_003713 |
| 4076 | PPAP2B | GGAUCUAUUACCUGAAGAA | NM_177414 |
| 4077 | PPAP2B | GGAGGAGGAGGCAAAGUUA | NM_003713 |
| 4078 | PPAP2B | AAUAAAAGCUCGUAACACA | NM_003713 |
| 4079 | PPAP2B | GCAGAGGUGAUGACAGCAA | NM_003713 |
| 4080 | PPAP2B | CAUCAAGUACCCACUGAAA | NM_003713 |
| 4081 | PPAP2B | AAGGCUACAUUCAGAACUA | NM_177414 |
| 4082 | PPAP2B | CCAUAUGGAUCAACCACAU | NM_003713 |
| 4083 | PPAP2B | GGAACAAUCACCACAACAU | NM_003713 |
| 4084 | PPAP2B | GGAACCAGCUGCGGAGGAA | NM_003713 |
| 4085 | PPAP2B | AGAAAUAGCACUGAAUCAA | NM_003713 |
| 4086 | PPAP2B | AUUCAGAACUACAGAUGCA | NM_177414 |
| 4087 | PPAP2B | CUGCGAAACUAUACUUGUA | NM_003713 |
| 4088 | PPAP2B | GGACAUUAUUGACAGGAAC | NM_003713 |
| 4089 | PPAP2B | GGCAGAACAUAUGGGUUAA | NM_003713 |
| 4090 | PPAP2C | AGGAGGAGCUGGAACGGAA | NM_003712 |
| 4091 | PPAP2C | GAUAGUUGCUGUUUUGUAA | NM_003712 |
| 4092 | PPAP2C | GAGAAGGUGUGCAGGGGAA | NM_003712 |
| 4093 | PPAP2C | UGACAGACCUGGCCAAGUA | NM_177526 |
| 4094 | PPAP2C | GCUCGGACUUCAACAACUA | NM_003712 |
| 4095 | PPAP2C | CCGCGUGUCUGAUUACAAA | NM_003712 |
| 4096 | PPAP2C | ACCACAACCACUAUGGAUA | NM_177526 |
| 4097 | PPAP2C | GCACGACUCUGUUGGAAGU | NM_177526 |
| 4098 | PPAP2C | GGGAUGUACUGCAUGGUGU | NM_003712 |
| 4099 | PPAP2C | GGGAAGCCUACCUGGUGUA | NM_003712 |
| 4100 | PPAP2C | GGAUGUACUGCAUGGUGUU | NM_003712 |
| 4101 | PPAP2C | UAAGGAAGGGACCGAGAGA | NM_003712 |
| 4102 | PPAP2C | CCACAACCACUAUGGAUAC | NM_003712 |
| 4103 | PPAP2C | GGGAAACCCUGCUGAUGUC | NM_003712 |
| 4104 | PPAP2C | CUACGUGGCUGCUGUAUAC | NM_177543 |
| 4105 | PPAP2C | CCAAAUAUCCCCUUCUUUU | NM_003712 |
| 4106 | PPAP2C | UCAGAUAGUUGCUGUUUUG | NM_003712 |
| 4107 | PPAP2C | CCACUGGAGCGAUGUCCUU | NM_003712 |
| 4108 | PPAP2C | UGGGUAGCCCUCAGCAUUU | NM_003712 |
| 4109 | PPAP2C | CUGGGUAGCCCUCAGCAUU | NM_003712 |
| 4110 | PPAP2C | GGAAGGGACCGAGAGAUCA | NM_003712 |
| 4111 | PPAP2C | CAACUACGUGGCUGCUGUA | NM_003712 |
| 4112 | PPAP2C | CAUCUCAGACUUCUUCAAA | NM_003712 |
| 4113 | PPAP2C | UAAAAUAGGGCACCUGUUU | NM_003712 |
| 4114 | PPAP2C | GACCACAACCACUAUGGAU | NM_177543 |
| 4115 | PPAP2C | GGACCGAGAGAUCAGAUAG | NM_003712 |
| 4116 | PPAP2C | AAGCCCAGCCUGUCACUGA | NM_177543 |
| 4117 | PPAP2C | GACCCACAGUCCAGUUCUU | NM_003712 |
| 4118 | PPAP2C | GAUCAGAUAGUUGCUGUUU | NM_003712 |
| 4119 | PPAP2C | GAAGGGACCGAGAGAUCAG | NM_003712 |
| 4120 | PPEF1 | GAUCAAACCUCGAGGGAAA | NM_152225 |
| 4121 | PPEF1 | GAACAGGACAUGAGGGAUA | NM_152225 |
| 4122 | PPEF1 | GAACAAAGAUGGAAGCAUU | NM_152225 |
| 4123 | PPEF1 | CGAAUAUGCUGAUGAACAA | NM_152226 |
| 4124 | PPEF1 | GGGAACAGGUGGUGACUAU | NM_152226 |
| 4125 | PPEF1 | GGGAAACCCUCUUCAAUAA | NM_152225 |
| 4126 | PPEF1 | GGAUUUGGUUUCAGCAUUA | NM_006240 |
| 4127 | PPEF1 | CCACAGAAAAUCAGGAAAA | NM_152223 |
| 4128 | PPEF1 | CCAGCAAAGUGAAGAUCUA | NM_152226 |
| 4129 | PPEF1 | GAGGGAGACAGGAGGAAUA | NM_152223 |
| 4130 | PPEF1 | ACAUAAUGGACUUGAACAA | NM_152223 |
| 4131 | PPEF1 | CAAGAUAUUAAGAGAGAGA | NM_152224 |
| 4132 | PPEF1 | AGAAAGUCCUGAAGCAAAU | NM_152226 |
| 4133 | PPEF1 | CAGAAUAUCCGCAUUGAAA | NM_152223 |
| 4134 | PPEF1 | CCAAGAAAGUCCUGAAGCA | NM_006240 |
| 4135 | PPEF1 | GUACAAUCGUUGACAAUGA | NM_006240 |
| 4136 | PPEF1 | CCAUCAAGAUAUUAAGAGA | NM_006240 |
| 4137 | PPEF1 | GGAACAGAGUGGAUACUAU | NM_152225 |
| 4138 | PPEF1 | GGGAACAGAUUAUUGAUAU | NM_006240 |
| 4139 | PPEF1 | GGAAACAAACAGAGACCAU | NM_152224 |
| 4140 | PPEF1 | CAGCAGUUCUUCAACGAAA | NM_006240 |
| 4141 | PPEF1 | GAGAGGAACAAGAUGAAAU | NM_152225 |
| 4142 | PPEF1 | GAUAUGAAGACUUGAUGAA | NM_152225 |
| 4143 | PPEF1 | AAGAAAGUCCUGAAGCAAA | NM_152226 |
| 4144 | PPEF1 | GGGAAAGGCUGGGAGAACA | NM_152223 |
| 4145 | PPEF1 | UAAGGAAGAGCUAGAAUUA | NM_152226 |
| 4146 | PPEF1 | ACAAACAGAUGCAUAGUAU | NM_152225 |
| 4147 | PPEF1 | GCCAAAGAGUGGAUACUAU | NM_152226 |
| 4148 | PPEF1 | AUUAAGAGAGAGAGUGAUU | NM_006240 |
| 4149 | PPEF1 | CAAACUAUGUUCUGGUACA | NM_152226 |
| 4150 | PPEF2 | CCAAGGAAGUGAUGAAUAA | NM_006239 |
| 4151 | PPEF2 | GAACUUAGGUAUAGUGUUU | NM_152933 |
| 4152 | PPEF2 | CAAUCAAGUUUGCUGGAAA | NM_006239 |
| 4153 | PPEF2 | CAACAAAGAUGGCCACAUU | NM_006239 |
| 4154 | PPEF2 | CCUGGUGACCGGAGAGAAA | NM_006239 |
| 4155 | PPEF2 | GAAGAAAUGCAGUGACUAU | NM_006239 |
| 4156 | PPEF2 | ACAACAUGCUGGAGUACAA | NM_006239 |
| 4157 | PPEF2 | AGAAGCAGAUGGAGGAGAA | NM_006239 |
| 4158 | PPEF2 | GUUAAGAACCACUGACAAU | NM_152933 |
| 4159 | PPEF2 | AUGCAAACCUGAAGGCUAU | NM_006239 |
| 4160 | PPEF2 | GAGACAACAUGCUGGAGUA | NM_152933 |
| 4161 | PPEF2 | GAGGAAACCAUGAGGACCA | NM_006239 |
| 4162 | PPEF2 | CCAAGAAACAUCUGGUACA | NM_006239 |
| 4163 | PPEF2 | GAGAGGAGCAAGAUAGUUU | NM_152933 |
| 4164 | PPEF2 | GGGAGAAGCUGUUUGCUCA | NM_006239 |
| 4165 | PPEF2 | UGGAAACAUUGUAUCGAAA | NM_006239 |
| 4166 | PPEF2 | GAUCCAACCUAGAGACCAU | NM_152934 |
| 4167 | PPEF2 | CCGUGGAACUGGAGCUAGA | NM_152933 |
| 4168 | PPEP2 | GAGGAGAAGAGAAGAGCCA | NM_006239 |
| 4169 | PPEF2 | CAGUAGAGAUCCUGAUGAU | NM_006239 |
| 4170 | PPEF2 | UAAGAAGGAUGUCAGGAUA | NM_152933 |
| 4171 | PPEF2 | AAUACAAGGUACACGGGAA | NM_006239 |
| 4172 | PPEF2 | GAGCAUUGCGCUUAAACUA | NM_006239 |
| 4173 | PPEF2 | AAGAAGACAUGGCAGACUA | NM_152934 |
| 4174 | PPEF2 | GGAGGCAGGUUGUAGAUAU | NM_006239 |
| 4175 | PPEF2 | CAACACUAUUCGAGGAGGA | NM_006239 |
| 4176 | PPEF2 | GCUACAAAUGCUAAAGACA | NM_006239 |
| 4177 | PPEF2 | GUAAGAAGGAUGUCAGGAU | NM_152933 |
| 4178 | PPEF2 | UGUAUGAAACCAAGAAACA | NM_152933 |
| 4179 | PPEF2 | ACCAUGAGGCAAAGGAUUA | NM_152933 |
| 4180 | PPI5PIV | UGGGAAGGACAAAGAGUUU | NM_019892 |
| 4181 | PPI5PIV | GGCCAAGCCUAUUGUGUGA | NM_019892 |
| 4182 | PPI5PIV | ACACGGGUAUCCAGAGCAA | NM_019892 |
| 4183 | PPI5PIV | GGAAAGGGUCCAUCUUCAA | NM_019892 |
| 4184 | PPI5PIV | GCAGCAAGCACUACAGAGU | NM_019892 |
| 4185 | PPI5PIV | GUGAAAAUCUAGGGACAUU | NM_019892 |
| 4186 | PPI5PIV | CCACUGGGAAGGACAAAGA | NM_019892 |
| 4187 | PP15PIV | GGAUUUCGAAGGAGAUUCA | NM_019892 |
| 4188 | PPM1A | GAUGAACACAUGAGAGUUA | NM_021003 |
| 4189 | PPM1A | AGGCAGAGUUGGACAAGUA | NM_021003 |
| 4190 | PPM1A | CCUAGAGGAUCAAGACAUA | NM_021003 |
| 4191 | PPM1A | ACAAAUGUGUCCAUGGAAA | NM_021003 |
| 4192 | PPM1A | GCUCAAAUGUGCAGAUGAU | NM_021003 |
| 4193 | PPM1A | CGCCAGAAGCAGUGAAGAA | NM_021003 |
| 4194 | PPM1A | GAAACAUGGUGCAGAUAGA | NM_177952 |
| 4195 | PPM1A | GAAGAAACAUGGUGCAGAU | NM_177951 |
| 4196 | PPM1A | GAGUUAUGUCAGAGAAGAA | NM_177951 |
| 4197 | PPM1A | UCAGAGAACUUCAGCAGUA | NM_021003 |
| 4198 | PPM1A | CAACAGAUGAUAUGUGGUA | NM_021003 |
| 4199 | PPM1A | ACAAGAAAUGUUUGGCUUA | NM_021003 |
| 4200 | PPM1A | GGACUUGAAUCGUGGUCAU | NM_177951 |
| 4201 | PPM1A | GCAAGCAAGAGGAAUGUUA | NM_021003 |
| 4202 | PPM1A | UCAAAUGUGCAGAUGAUUA | NM_021003 |
| 4203 | PPM1A | CAGUGAAGAAGGAGGCAGA | NM_177951 |
| 4204 | PPM1A | CCAAUAACCAGGAUUUUAA | NM_021003 |
| 4205 | PPM1A | GGAAUGCAGAGUAGAAGAA | NM_021003 |
| 4206 | PPM1A | UGAGAAAGUUUGCAAUGAA | NM_021003 |
| 4207 | PPM1A | CCAAAUGCACCCAAAGUAU | NM_021003 |
| 4208 | PPM1A | CUGAUGACCUUGAGAAAGU | NM_021003 |
| 4209 | PPM1A | UCUGGGAUGUUAUGGGAAA | NM_021003 |
| 4210 | PPM1A | CGAGACAACAUGAGUGUGA | NM_177951 |
| 4211 | PPM1A | CCAUGAGUAUUGCAGGUAA | NM_021003 |
| 4212 | PPM1A | GGUAAUGGGUUGCGAUAUG | NM_021003 |
| 4213 | PPM1A | AGUCCAUGAUAUUGAAAGA | NM_177952 |
| 4214 | PPM1A | GAACAGGUUUUCUGGAGAU | NM_021003 |
| 4215 | PPM1A | AAAUCAGACUCCAGCAAUU | NM_021003 |
| 4216 | PPM1A | CACUGAUGACCUUGAGAAA | NM_021003 |
| 4217 | PPM1A | CAGAAGCAGUGAAGAAGGA | NM_021003 |
| 4218 | PPM1B | GGAAGAUGCUCCAGAGAGA | NM_002706 |
| 4219 | PPM1B | GGAGAAGUCUGGCGAGGAA | NM_177968 |
| 4220 | PPM1B | GAGCAGAAGAGGAUGAAUU | NM_002706 |
| 4221 | PPM1B | UUGAAGAGAUUAUGGAGAA | NM_002706 |
| 4222 | PPM1B | CUCCAGAGCCUGAGGUUUA | NM_002706 |
| 4223 | PPM1B | AGAAAGUGGUCUUGCUGAA | NM_002706 |
| 4224 | PPM1B | CUGAAUCCACAUAGAGAAA | NM_177968 |
| 4225 | PPM1B | CCAAGUGUUUAGAAUGAAA | NM_002706 |
| 4226 | PPM1B | GCGCUAGGGUGGAGAGAAG | NM_002706 |
| 4227 | PPM1B | UAAAGUAGAGGGAGAAGAA | NM_002706 |
| 4228 | PPM1B | CAGGAAAGCCAUACUGAAU | NM_002706 |
| 4229 | PPM1B | CCUAGGAAGUGUAAUGUAU | NM_002706 |
| 4230 | PPM1B | CAGAAGAGGAUGAAUUUAU | NM_002706 |
| 4231 | PPM1B | GAACAGUGAUGCUGGAAAC | NM_002706 |
| 4232 | PPM1B | GGAAAGCCAUACUGAAUCA | NM_002706 |
| 4233 | PPM1B | UCUGGGAUGUUAUGAGUAA | NM_002706 |
| 4234 | PPM1B | CAAGGGAAGUCGAGAUAAC | NM_002706 |
| 4235 | PPM1B | CACAAGGGAAGUCGAGAUA | NM_002706 |
| 4236 | PPM1B | GAUGAUAAUUUGUGUGUUG | NM_002706 |
| 4237 | PPM1B | GGACAGGAGUGGUUCAACU | NM_002706 |
| 4238 | PPM1B | AGGAGAUGCUGACUAGUUA | NM_002706 |
| 4239 | PPM1B | CGAGAUAACAUGAGUAUUG | NM_002706 |
| 4240 | PPM1B | GAUGAUACAACGUGUUAAU | NM_002706 |
| 4241 | PPM1B | GGACAAGUCUGCUUUUCUA | NM_002706 |
| 4242 | PPM1B | AACCAAGUGUUUAGAAUGA | NM_002706 |
| 4243 | PPM1B | GAUUAGAGAGAUUAUGCUA | NM_002706 |
| 4244 | PPM1B | UGGCAAGCGUAAUGUUAUU | NM_177968 |
| 4245 | PPM1B | GCGUAAUGUUAUUGAAGCU | NM_177969 |
| 4246 | PPM1B | GUUGAAGAGAUUAUGGAGA | NM_002706 |
| 4247 | PPM1B | GCCUGAGGUUUAUGAAAUU | NM_002706 |
| 4248 | PPM1D | UGAGAUAGCUCGAGAGAAU | NM_003620 |
| 4249 | PPM1D | GGGUAUAAGUUGCUGUAAA | NM_003620 |
| 4250 | PPM1D | CCAAUGAAGAUGAGUUAUA | NM_003620 |
| 4251 | PPM1D | CGAAAUGGCUUAAGUCGAA | NM_003620 |
| 4252 | PPM1D | GCAUAGACGAAAUGGCUUA | NM_003620 |
| 4253 | PPM1D | GCGAAAGAACUCUGUUAAA | NM_003620 |
| 4254 | PPM1D | AAUGAAAGCCCAAGAAAUU | NM_003620 |
| 4255 | PPM1D | CCUCAGAAGCACAAGUAUA | NM_003620 |
| 4256 | PPM1D | GGUAUAAGUUGCUGUAAAA | NM_003620 |
| 4257 | PPM1D | UGUCCAAGGUGUAGUCAUA | NM_003620 |
| 4258 | PPM1D | AGAUAACACUAGUGCCAUA | NM_003620 |
| 4259 | PPM1D | GAAGAAGCAUAGACGAAAU | NM_003620 |
| 4260 | PPM1D | GGACUUGGUGGGAGUGUAA | NM_003620 |
| 4261 | PPM1D | GUUAGAAGGAGCACAGUUA | NM_003620 |
| 4262 | PPM1D | UCAAGAAGCAGAAGGGUUU | NM_003620 |
| 4263 | PPM1D | CGGAAUGGCCAAAGACUAU | NM_003620 |
| 4264 | PPM1D | GGAAAGAGAACGAAUCGAA | NM_003620 |
| 4265 | PPM1D | GGAAGAAACUGGCGGAAUG | NM_003620 |
| 4266 | PPM1D | AGUGAUGGACUUUGGAAUA | NM_003620 |
| 4267 | PPM1D | CAUAGAAGGAAGUGUGUUU | NM_003620 |
| 4268 | PPM1D | AUGAAGAAGCAUAGACGAA | NM_003620 |
| 4269 | PPM1D | CCACAACCUCACAGCGAAA | NM_003620 |
| 4270 | PPM1D | GGAAGUACAUGGAGGACGU | NM_003620 |
| 4271 | PPM1D | CGAAGGACUUGGUGGGAGU | NM_003620 |
| 4272 | PPM1D | GCAGAUAACACUAGUGCCA | NM_003620 |
| 4273 | PPM1D | GCGGAAUGGCCAAAGACUA | NM_003620 |
| 4274 | PPM1D | GAAUAAUAGCCUUCCAAUU | NM_003620 |
| 4275 | PPM1D | AAACCUUAGUCAUCAGAUA | NM_003620 |
| 4276 | PPM1D | CCUACUAAUUCAACAAACA | NM_003620 |
| 4277 | PPM1D | AAAUGAAAGCCCAAGAAAU | NM_003620 |
| 4278 | PPM1E | GGGAAGAGAAAUAGGAUAA | NM_014906 |
| 4279 | PPM1E | GGAAGUGGGAAGAGAAAUA | NM_014906 |
| 4280 | PPM1E | GGGCCAAGCUGUUGAACUA | NM_014906 |
| 4281 | PPM1E | GAUAAGGCUUUGUGGGAAA | NM_014906 |
| 4282 | PPM1E | UGGAAAGGGUACAGUGAAA | NM_014906 |
| 4283 | PPM1E | AGGUUAUGCUUGUGAGAAA | NM_014906 |
| 4284 | PPM1E | UAAAGAGGGUAAAGGGAAA | NM_014906 |
| 4285 | PPM1E | UGUAAAUGUUAGUGAGGAA | NM_014906 |
| 4286 | PPM1E | CAGAAAGACUCAUGAUAUU | NM_014906 |
| 4287 | PPM1E | GAUUAUAUCCCAAAGGAAA | NM_014906 |
| 4288 | PPM1E | ACAAAUAGAAGCAAGCAAA | NM_014906 |
| 4289 | PPM1E | UCAGAAAGAUUUACGGAUU | NM_014906 |
| 4290 | PPM1E | CAAUGAAAGUGGUAAAUCA | NM_014906 |
| 4291 | PPM1E | GAGUGGUGCUGGAGAGUUU | NM_014906 |
| 4292 | PPM1E | GCAGGAAAAUGGAGGACAA | NM_014906 |
| 4293 | PPM1E | CAGAAAGAUUUACGGAUUU | NM_014906 |
| 4294 | PPM1E | GCAAAUAGCUUAAAUGUCU | NM_014906 |
| 4295 | PPM1E | GGAGAUUGAGACAGUGAAA | NM_014906 |
| 4296 | PPM1E | AAACAAAGGCAGCAGACUA | NM_014906 |
| 4297 | PPM1E | UGGCACAGAUUCAGGUUUA | NM_014906 |
| 4298 | PPM1E | CAACUGAAGUCAUUACAAA | NM_014906 |
| 4299 | PPM1E | AGAUUGAGACAGUGAAAUU | NM_014906 |
| 4300 | PPM1E | GGGAGUAGAUGCUGCUAUU | NM_014906 |
| 4301 | PPM1E | CAAAUACACUAUAGAGUCA | NM_014906 |
| 4302 | PPM1E | GCAAGAAGAUGGUGGGGAU | NM_014906 |
| 4303 | PPM1E | GAUGCUGGGUCAAGUGAUA | NM_014906 |
| 4304 | PPM1E | GCAACAAUGUCAAUGUCAA | NM_014906 |
| 4305 | PPM1E | UGAAGGAGGCUGAAAGUAU | NM_014906 |
| 4306 | PPM1E | GGACAUGAACAAAGCUGUA | NM_014906 |
| 4307 | PPM1E | GGUGAAAGUUCUACACUCA | NM_014906 |
| 4308 | PPM1F | GAGAAUGGUUGGCCACAAA | NM_014634 |
| 4309 | PPM1F | CAGAUGAGGUUGAGACCAU | NM_014634 |
| 4310 | PPM1F | AAGAAGAGGAGGAGGACGA | NM_014634 |
| 4311 | PPM1F | AGGAAGAAGAAGAGGAGGA | NM_014634 |
| 4312 | PPM1F | CCACAGAAGAGCAGCCCAA | NM_014634 |
| 4313 | PPM1F | GAGCCAAACUCUUGAAGCA | NM_014634 |
| 4314 | PPM1F | AUGCAGAAGUGUCAAUAAA | NM_014634 |
| 4315 | PPM1F | AAGAAGAAGAGGAGGAGGA | NM_014634 |
| 4316 | PPM1F | UGACGAAGAGAGAGAAUGA | NM_014634 |
| 4317 | PPM1F | AGACAGACCUUUCCGAAUU | NM_014634 |
| 4318 | PPM1F | GGCAUAACCUUGACGAAGA | NM_014634 |
| 4319 | PPM1F | GGGUUCAUAUUUACAGAUA | NM_014634 |
| 4320 | PPM1F | GGAUAGGCCCAUUGAGGUU | NM_014634 |
| 4321 | PPM1F | GUUAAAGGAAGCAGUGUUU | NM_014634 |
| 4322 | PPM1F | UAAGUGGGCUGGAGAAGAA | NM_014634 |
| 4323 | PPM1F | CCAAGAAGCUAGGUGGUUU | NM_014634 |
| 4324 | PPM1F | CCAGUUGGGCUGUGUUAAA | NM_014634 |
| 4325 | PPM1F | GGACCUUGCUGCUGUGUGA | NM_014634 |
| 4326 | PPM1F | ACGAUGACGAGGAGGAAAA | NM_014634 |
| 4327 | PPM1F | GCGUGGAUGCUGCGAGGUA | NM_014634 |
| 4328 | PPM1F | AAACAUAGUCGCUGUCAUU | NM_014634 |
| 4329 | PPM1F | GACCAGAACGGCAGGAUGA | NM_014634 |
| 4330 | PPM1F | CGGAGGAAGAAGAAGAGGA | NM_014634 |
| 4331 | PPM1F | CCAGGGAGGAAGAAGAAGA | NM_014634 |
| 4332 | PPM1F | CCAGGUGGGUUCAUAUUUA | NM_014634 |
| 4333 | PPM1F | UCCCAAAUAUCUUGUGAAU | NM_014634 |
| 4334 | PPM1F | UCAGGAAAGCCAAGCGAGA | NM_014634 |
| 4335 | PPM1F | CCACAAACAAUGACCAAGU | NM_014634 |
| 4336 | PPM1F | UUACACAGCUUUGAAGAAA | NM_014634 |
| 4337 | PPM1F | CAAACAAUGACCAAGUAUU | NM_014634 |
| 4338 | PPM1G | CGAUGAAGAAGAAGAAGAA | NM_002707 |
| 4339 | PPM1G | AGGCAGAGAAUGAGGAAGA | NM_177983 |
| 4340 | PPM1G | CAGAUGAGGCGGAGGAAGA | NM_002707 |
| 4341 | PPM1G | UGGAAGAGCUGCUGGAUCA | NM_002707 |
| 4342 | PPM1G | CGGAGGAAGAAGAGGAAGA | NM_002707 |
| 4343 | PPM1G | CAGCAGAGCUCCAGCCAGA | NM_002707 |
| 4344 | PPM1G | CUGAAGAAGUCAUUAAAGA | NM_177983 |
| 4345 | PPM1G | GUGAGGAGGCAGAGAAUGA | NM_177983 |
| 4346 | PPM1G | GGACGAUGAAGAAGAAGAA | NM_002707 |
| 4347 | PPM1G | AGAAGAAGGCCAAGCGAGA | NM_002707 |
| 4348 | PPM1G | CUGAAGAGGACGAUGAAGA | NM_177983 |
| 4349 | PPM1G | ACAGAAGGCUUUAGAAGAU | NM_002707 |
| 4350 | PPM1G | GCGAGGAAGAGGAUGGCUA | NM_177983 |
| 4351 | PPM1G | AGAGGAAGACAGUGAGGAA | NM_177983 |
| 4352 | PPM1G | AUGAAGAUGAUGUGGACAA | NM_177983 |
| 4353 | PPM1G | CCACUGAAGAAGUCAUUAA | NM_002707 |
| 4354 | PPM1G | UGGCAAAGCUUUAGACAUG | NM_002707 |
| 4355 | PPM1G | ACAAGAAGAAGAAGGCCAA | NM_177983 |
| 4356 | PPM1G | AAGAAGAGGAAGACAGUGA | NM_002707 |
| 4357 | PPM1G | GCAACAGCGACAAGAAGAA | NM_002707 |
| 4358 | PPM1G | AAGAAGAAGAAGAGAUGAU | NM_002707 |
| 4359 | PPM1G | AUGAAGAAGAAGAAGAAGA | NM_002707 |
| 4360 | PPM1G | CAAAUUGACCACUGAAGAA | NM_002707 |
| 4361 | PPM1G | GGACAGUGAGGAUGAGUCA | NM_002707 |
| 4362 | PPM1G | CCACUGAGGAUGAAGAUGA | NM_002707 |
| 4363 | PPM1G | GGAAACUCCUUCACAAGAA | NM_002707 |
| 4364 | PPM1G | UCAAAGAUCAGAAGGCCUA | NM_177983 |
| 4365 | PPM1G | AAGAAGAAGAAGAAGAGAU | NM_177983 |
| 4366 | PPM1G | CAGAGAGUGGCAAGCGAAA | NM_177983 |
| 4367 | PPM1G | AUGAGGAAGAUGAGGAUGA | NM_002707 |
| 4368 | PPM1L | AAGGAAAGAAAGAGGAUAA | NM_139245 |
| 4369 | PPM1L | GAAAGAAAGAGGAUAAAGA | NM_139245 |
| 4370 | PPM1L | GGCCAAGAGCAUAGUUUUA | NM_139245 |
| 4371 | PPM1L | AAGAAAGAGGAUAAAGAGA | NM_139245 |
| 4372 | PPM1L | CAGUCAUGGUGGUGAAGUU | NM_139245 |
| 4373 | PPM1L | CAGUUGAAGGAAAGAAAGA | NM_139245 |
| 4374 | PPM1L | AUGAAGAAGCAGUUCGAUU | NM_139245 |
| 4375 | PPM2C | CCAAGAGUGUCGUGAAACA | NM_018444 |
| 4376 | PPM2C | ACUGAUGGGUUGUGGGAGA | NM_018444 |
| 4377 | PPM2C | GGGCAUUUGGAGAUGUAAA | NM_018444 |
| 4378 | PPM2C | UGGUUAGGAUUGUGGGUGA | NM_018444 |
| 4379 | PPM2C | GCUCGAAUGUACAGAGAUG | NM_018444 |
| 4380 | PPM2C | AGGAUAAGUUUCUGGUGUU | NM_018444 |
| 4381 | PPM2C | GCAAUCAGCUGCCUGCAAA | NM_018444 |
| 4382 | PPM2C | ACAGAAAGGAGAACCAAAA | NM_018444 |
| 4383 | PPM2C | GCAUCCAAAUUGUACUUUA | NM_018444 |
| 4384 | PPP1CA | CCGCCAAAGCCAAGAAAUA | NM_002708 |
| 4385 | PPP1CA | CAUCUGGUCUCUUGAAUAA | NM_002708 |
| 4386 | PPP1CA | UGGAUUGAUUGUACAGAAA | NM_002708 |
| 4387 | PPP1CA | CGGCCAUAGUGGACGAAAA | NM_002708 |
| 4388 | PPP1CA | GAGCAGAUUCGGCGGAUCA | NM_002708 |
| 4389 | PPP1CA | GUUUCUACGAUGAGUGCAA | NM_206873 |
| 4390 | PPP1CA | CAAGAUCUGCGGUGACAUA | NM_002708 |
| 4391 | PPP1CA | GCUACGAGUUCUUUGCCAA | NM_002708 |
| 4392 | PPP1CA | CCGACAAGAACAAGGGGAA | NM_002708 |
| 4393 | PPP1CA | GCAAGAGACGCUACAACAU | NM_002708 |
| 4394 | PPP1CA | CCAUCUGGUCUCUUGAAUA | NM_002708 |
| 4395 | PPP1CA | GCGAGAAGCUCAACCUGGA | NM_206873 |
| 4396 | PPP1CA | UGGCCAAGUUCCUCCACAA | NM_002708 |
| 4397 | PPP1CA | CCAUGAUGAGUGUGGACGA | NM_002708 |
| 4398 | PPP1CA | AUGGAUUGAUUGUACAGAA | NM_002708 |
| 4399 | PPP1CA | AUGUACAGCUGACAGAGAA | NM_002708 |
| 4400 | PPP1CA | CAACAUCAAACUGUGGAAA | NM_002708 |
| 4401 | PPP1CA | CCCAGAUGAUGGAUUGAUU | NM_002708 |
| 4402 | PPP1CA | CUGCUGGCCUAUAAGAUCA | NM_002708 |
| 4403 | PPP1CA | GGAUUGAUUGUACAGAAAU | NM_002708 |
| 4404 | PPP1CA | GAUGAUGGAUUGAUUGUAC | NM_002708 |
| 4405 | PPP1CA | CCGAGGUGGUGGCCAAGUU | NM_002708 |
| 4406 | PPP1CA | CCAAGUUCCUCCACAAGCA | NM_002708 |
| 4407 | PPP1CA | ACAUGGAGCCUUGGUGUAU | NM_002708 |
| 4408 | PPP1CA | AAGAGACGCUACAACAUCA | NM_002708 |
| 4409 | PPP1CA | UGCAAGAGACGCUACAACA | NM_002708 |
| 4410 | PPP1CA | UGACAUACACGGCCAGUAC | NM_002708 |
| 4411 | PPP1CA | CAGAUGAUGGAUUGAUUGU | NM_002708 |
| 4412 | PPP1CA | CAUCUAUGGUUUCUACGAU | NM_002708 |
| 4413 | PPP1CA | UCUAUGGUUUCUACGAUGA | NM_002708 |
| 4414 | PPP1CB | GGGAAGAGCUUUACAGACA | NM_002709 |
| 4415 | PPP1CB | CAACACGACUUGAAAUAAA | NM_002709 |
| 4416 | PPP1CB | GCAGAUGACUGAAGCAGAA | NM_002709 |
| 4417 | PPP1CB | GGGUAAAGGAUCUUAAAUU | NM_002709 |
| 4418 | PPP1CB | GUAAAUUCAUCCAGGUCAA | NM_002709 |
| 4419 | PPP1CB | AGACUAAGUAUGUUGGUUA | NM_002709 |
| 4420 | PPP1CB | AGCAGAAGUUCGAGGCUUA | NM_002709 |
| 4421 | PPP1CB | CAGGAAAGAUUGUGCAGAU | NM_002709 |
| 4422 | PPP1CB | GCUAAACGACAGUUGGUAA | NM_002709 |
| 4423 | PPP1CB | GGAAGAUGGAUAUGAAUUU | NM_002709 |
| 4424 | PPP1CB | UCAAAUAUCCAGAGAACUU | NM_002709 |
| 4425 | PPP1CB | UGAGAAACCUGUUAACUUA | NM_002709 |
| 4426 | PPP1CB | GUAAAGAAACCAUCAGAUU | NM_002709 |
| 4427 | PPP1CB | GUGCAAGGCUGGGGAGAAA | NM_002709 |
| 4428 | PPP1CB | UCACUAGAAUAAUGGCAAA | NM_002709 |
| 4429 | PPP1CB | CGGAGAAUUAUGAGACCUA | NM_002709 |
| 4430 | PPP1CB | GGUGGAAGAUGGAUAUGAA | NM_002709 |
| 4431 | PPP1CB | GGCAACACGACUUGAAAUA | NM_002709 |
| 4432 | PPP1CB | GCUGAAAAUUUGUGGAGAU | NM_002709 |
| 4433 | PPP1CB | UGGAGAUAUUCAUGGACAA | NM_002709 |
| 4434 | PPP1CB | UGAUAAUGCUGGUGGAAUG | NM_002709 |
| 4435 | PPP1CB | AGAUAAGGCUCAUAUAGUA | NM_002709 |
| 4436 | PPP1CB | GAAUGCAAACGAAGAUUUA | NM_002709 |
| 4437 | PPP1CB | GACUAAGUAUGUUGGUUAA | NM_002709 |
| 4438 | PPP1CB | UCACAAAGGUUUUAUCUGA | NM_002709 |
| 4439 | PPP1CB | AAUCAAAUAUCCAGAGAAC | NM_002709 |
| 4440 | PPP1CB | GCAAUGAGUAGAAAAGUUA | NM_002709 |
| 4441 | PPP1CB | CUGAAAAUUUGUGGAGAUA | NM_002709 |
| 4442 | PPP1CB | GAUUAUGUGGACAGAGGAA | NM_002709 |
| 4443 | PPP1CB | GUAUGUUGGUUAAUAGGAA | NM_002709 |
| 4444 | PPP1CC | GCGGUGAAGUUGAGGCUUA | NM_002710 |
| 4445 | PPP1CC | UUUAAAGCCUGCAGAGAAA | NM_002710 |
| 4446 | PPP1CC | CAAAGCAAGCAAAGAAAUA | NM_002710 |
| 4447 | PPP1CC | GCAAAGAGGCAGUUGGUCA | NM_002710 |
| 4448 | PPP1CC | GGUUGAAGAUGGAUAUGAA | NM_002710 |
| 4449 | PPP1CC | GGUUAUAACAGCAAAUGAA | NM_002710 |
| 4450 | PPP1CC | UCACAAAGCAAGCAAAGAA | NM_002710 |
| 4451 | PPP1CC | GGGUAUGAUCACAAAGCAA | NM_002710 |
| 4452 | PPP1CC | AGUUGAGGCUUAUAAGUUA | NM_002710 |
| 4453 | PPP1CC | GGAAAGCAGUCAUUGGAGA | NM_002710 |
| 4454 | PPP1CC | GUGAUAUAGUGCUGUUUAA | NM_002710 |
| 4455 | PPP1CC | GCUAUCAACAUUAGGAGUA | NM_002710 |
| 4456 | PPP1CC | CUUAAAGUCUCGUGAAAUC | NM_002710 |
| 4457 | PPP1CC | GUCCAAGCCUGGUAAGAAU | NM_002710 |
| 4458 | PPP1CC | GUAAGAAUGUCCAGCUUCA | NM_002710 |
| 4459 | PPP1CC | UGCUUAAAGUCUCGUGAAA | NM_002710 |
| 4460 | PPP1CC | CUGCUGUCAUGGAGGUUUA | NM_002710 |
| 4461 | PPP1CC | GGAAGGCGAUGGCGGAUUU | NM_002710 |
| 4462 | PPP1CC | CUAUCAACAUUAGGAGUAA | NM_002710 |
| 4463 | PPP1CC | UGUACAUGUUCUUGUCAUA | NM_002710 |
| 4464 | PPP1CC | AGCCAAAGUUUCUGUUGAA | NM_002710 |
| 4465 | PPP1CC | CCAAAGUUUCUGUUGAAUU | NM_002710 |
| 4466 | PPP1CC | CUUCACAUUUGGUGCAGAA | NM_002710 |
| 4467 | PPP1CC | CAGAUGACCGUGUACAAUA | NM_002710 |
| 4468 | PPP1CC | CACAAAGCAAGCAAAGAAA | NM_002710 |
| 4469 | PPP1CC | AGUACAAGGUGGUAUGGUU | NM_002710 |
| 4470 | PPP1CC | GUUGAGGCUUAUAAGUUAA | NM_002710 |
| 4471 | PPP1CC | UCACAGUACCUAUGACUUU | NM_002710 |
| 4472 | PPP1CC | UCUUAUAUGUAGAGCCCAU | NM_002710 |
| 4473 | PPP1CC | CGGCGAAUUAUGCGACCAA | NM_002710 |
| 4474 | PPP1R11 | GAACAGAGAUCCUGAAAUU | NM_021959 |
| 4475 | PPP1R11 | GGAGAAACAGCAAGGAUUA | NM_170781 |
| 4476 | PPP1R11 | GGAGGAAGACGGAGAAACA | NM_170781 |
| 4477 | PPP1R11 | GGCGAGAGCUCCACGGAAA | NM_021959 |
| 4478 | PPP1R11 | CUGCUGUAUUUAUGAGAAA | NM_021959 |
| 4479 | PPP1R11 | GAUAGAGGGAAGAGGAAGA | NM_021959 |
| 4480 | PPP1R11 | GAAACGGAAGCCAGAGAAA | NM_021959 |
| 4481 | PPP1R11 | GGAAAGUGAUGAGGAGGAA | NM_021959 |
| 4482 | PPP1R11 | GGGAGGGAGCAAAGAGAUU | NM_021959 |
| 4483 | PPP1R11 | CGGAGAAACAGCAAGGAUU | NM_170781 |
| 4484 | PPP1R11 | GUGAUGAGGAGGAAGAAGA | NM_170781 |
| 4485 | PPP1R11 | CGGAAAGUGAUGAGGAGGA | NM_021959 |
| 4486 | PPP1R11 | UAGGAGAACCGGAGCCUUA | NM_170781 |
| 4487 | PPP1R11 | CAACCGAGCCCGAUGAUUU | NM_170781 |
| 4488 | PPP1R11 | CCACAGAUGCACAAAAUAA | NM_021959 |
| 4489 | PPP1R11 | GCUUGAGAUUGGUCACUUA | NM_021959 |
| 4490 | PPP1R11 | GUAGAAUGGACAAGUGACA | NM_021959 |
| 4491 | PPP1R11 | CCCGAGAACCGGAGCCUUA | NM_021959 |
| 4492 | PPP1R11 | GUUUAGAGCUAUCCCACUA | NM_021959 |
| 4493 | PPP1R11 | CAACAUGAGUAGCGAACAC | NM_170781 |
| 4494 | PPP1R11 | GAAGAGGGCUGUGGUCAUA | NM_021959 |
| 4495 | PPP1R11 | GGAAGAGGGAGGGAGCAAA | NM_021959 |
| 4496 | PPP1R11 | AGAAGAGGGCUGUGGUCAU | NM_021959 |
| 4497 | PPP1R11 | CGGAAACGGAAGCCAGAGA | NM_021959 |
| 4498 | PPP1R11 | GAACACUUAAAUUGGGUUU | NM_170781 |
| 4499 | PPP1R11 | UAAUCCUGGUUUAGAGCUA | NM_170781 |
| 4500 | PPP1R11 | AAAGUGAUGAGGAGGAAGA | NM_021959 |
| 4501 | PPP1R11 | GAAAAGAGGUCCUUGUCAU | NM_021959 |
| 4502 | PPP1R11 | CAUGAGUAGCGAACACUUA | NM_170781 |
| 4503 | PPP1R11 | AUACACAGUUACAGAGAUC | NM_021959 |
| 4504 | PPP1R11 | GGACAGACCAAGAGAAUAA | NM_015568 |
| 4505 | PPP1R16B | GCACAUAGCUGGAGCCAAU | NM_015568 |
| 4506 | PPP1R16B | GGACAUGCCUGUUGAGAAU | NM_015568 |
| 4507 | PPP1R16B | GGGCAUCACCCAAGAGAAA | NM_015568 |
| 4508 | PPP1R16B | GGAAGGAGUAUGAGGGAGA | NM_015568 |
| 4509 | PPP1R16B | GGAUAAAGGAGGAAUAAGA | NM_015568 |
| 4510 | PPP1R16B | GGACCAACCUGUAUAGGAA | NM_015568 |
| 4511 | PPP1R16B | CCAAAAGGAUGGAAGUUAA | NM_015568 |
| 4512 | PPP1R16B | GGAUGGAAGUUAAGACUCA | NM_015568 |
| 4513 | PPP1R16B | UAGAGGAGAUGGAGGAGAA | NM_015568 |
| 4514 | PPP1R16B | UCGACAACUUUGAGGAAAU | NM_015568 |
| 4515 | PPP1R16B | GGAUAGAAUUCUCCAUCAA | NM_015568 |
| 4516 | PPP1R16B | GGAGAGAGCUGUUUAGGUU | NM_015568 |
| 4517 | PPP1R16B | GCGAGGAGGAAGAGUUCAA | NM_015568 |
| 4518 | PPP1R16B | GGAACGACGCCGAGGAAGU | NM_015568 |
| 4519 | PPP1R16B | CAGGACAGACCAAGAGAAU | NM_015568 |
| 4520 | PPP1R16B | GUGCAUGGCUGUUGCCGUA | NM_015568 |
| 4521 | PPP1R16B | AGCGAAAGCAUGAGCGGAA | NM_015568 |
| 4522 | PPP1R16B | ACAUCAACCUGGUGAAGAU | NM_015568 |
| 4523 | PPP1R16B | GCAAUGGGACCUCGGUAUA | NM_015568 |
| 4524 | PPP1R16B | GUGAAUAUCCAGACUGUUU | NM_015568 |
| 4525 | PPP1R16B | GGAGCUAGUCUCAGUGCAA | NM_015568 |
| 4526 | PPP1R16B | GCCAGAACCUCUUGGUGUA | NM_015568 |
| 4527 | PPP1R16B | AGACCAACCUCCAAUGAAU | NM_015568 |
| 4528 | PPP1R16B | CCAAAUGCAUCUCAGGUUU | NM_015568 |
| 4529 | PPP1R16B | GCGGAUAAAGGAGGAAUAA | NM_015568 |
| 4530 | PPP1R16B | GGGACAAGGUCAGUAUUUA | NM_015568 |
| 4531 | PPP1R16B | UCAAGUCACCUGAGGCAAA | NM_015568 |
| 4532 | PPP1R16B | UCUGGAACUUUCAGUGAUA | NM_015568 |
| 4533 | PPP1R16B | GAGAGAGGCCAGUUAAUUU | NM_015568 |
| 4534 | PPP1R16B | AGGAAGAUGAGGAGGAAGA | NM_032192 |
| 4535 | PPP1R16B | GGAUGAUGAAGAAGAGGAA | NM_032192 |
| 4536 | PPP1R16B | GGAGGGAGGUGGAGAAGGA | NM_032192 |
| 4537 | PPP1R16B | AAGAAGAGGAAGAAGAAGA | NM_032192 |
| 4538 | PPP1R16B | UGGAUGAGUCCGAGAGAGA | NM_032192 |
| 4539 | PPP1R1B | GGGUUAUCCAAGAGAGGAA | NM_032192 |
| 4540 | PPP1R1B | AGGAAGAGGAGGAUGAUGA | NM_032192 |
| 4541 | PPP1R1B | AGGAGGAAGAGGAGGAUGA | NM_032192 |
| 4542 | PPP1R1B | UGAAGAAGAGGAAGAAGAA | NM_032192 |
| 4543 | PPP1R1B | AUGAAGAAGAGGAAGAAGA | NM_032192 |
| 4544 | PPP1R1B | GAGAGGAAGAUGAGGAGGA | NM_032192 |
| 4545 | PPP1R1B | GAGGAGACACGCAGAGACA | NM_032192 |
| 4546 | PPP1R1B | GGAGGUGGGAUGUGAGACA | NM_032192 |
| 4547 | PPP1R1B | AUGAUGAAGAAGAGGAAGA | NM_032192 |
| 4548 | PPP1R1B | AGAGGAGGAUGAUGAAGAA | NM_181505 |
| 4549 | PPP1R1B | GAGGGAGGGAGGUGGAGAA | NM_032192 |
| 4550 | PPP1R1B | GCAAUUUGAAUGAGAACCA | NM_032192 |
| 4551 | PPP1R1B | GGAAGAGGAGGAUGAUGAA | NM_032192 |
| 4552 | PPP1R1B | AAGAAGAAGAGGACAGCCA | NM_181505 |
| 4553 | PPP1R1B | CUGAGGACCAAGUGGAAGA | NM_032192 |
| 4554 | PPP1R1B | AAGAGGAGGAUGAUGAAGA | NM_181505 |
| 4555 | PPP1R1B | AGGAAGAAGAAGAGGACAG | NM_032192 |
| 4556 | PPP1R1B | CAAGAGAGGAAGAUGAGGA | NM_032192 |
| 4557 | PPP1R1B | GCUGAAGUCCUGAAGGUCA | NM_032192 |
| 4558 | PPP1R1B | CUGAAGUCCUGAAGGUCAU | NM_032192 |
| 4559 | PPP1R1B | AGAGGAAGAUGAGGAGGAA | NM_032192 |
| 4560 | PPP1R1B | AGGAGGAUGAUGAAGAAGA | NM_181505 |
| 4561 | PPP1R1B | GGACCAAGUGGAAGACCCA | NM_181505 |
| 4562 | PPP1R1B | CCAAGGACCGCAAGAAGAU | NM_032192 |
| 4563 | PPP1R1B | GGGAUUUGCCCUUCACAAU | NM_032192 |
| 4564 | PPP1R2 | AGACAAAGACUAUGGUUUA | NM_006241 |
| 4565 | PPP1R2 | CAAACUAGCCAGACAAUUA | NM_006241 |
| 4566 | PPP1R2 | UGAUAAACUUAGAGACUGA | NM_006241 |
| 4567 | PPP1R2 | CCACUGAUUUAGAAACAAA | NM_006241 |
| 4568 | PPP1R2 | CAGUUUAGCUGCUGAAUUU | NM_006241 |
| 4569 | PPP1R2 | CAGGAUAUAUAGACUGAUA | NM_006241 |
| 4570 | PPP1R2 | GAGACUGAUUAGACUGAAA | NM_006241 |
| 4571 | PPP1R2 | GAAGAUGCCUGUAGUGACA | NM_006241 |
| 4572 | PPP1R2 | CUUCACAAUUCAUGACUUA | NM_006241 |
| 4573 | PPP1R2 | GGAUAAGACUUUAAACAGU | NM_006241 |
| 4574 | PPP1R2 | GAAAAUAGUUUGAGUAGCA | NM_006241 |
| 4575 | PPP1R2 | UGGUGUAAAUGGAUUGUUA | NM_006241 |
| 4576 | PPP1R2 | GGUAUGAACUAGUCAAAAU | NM_006241 |
| 4577 | PPP1R2 | CAGACAAAGACUAUGGUUU | NM_006241 |
| 4578 | PPP1R2 | GUGGAGAGGAGGAUAGUGA | NM_006241 |
| 4579 | PPP1R2 | GUGCAGUAUUCUAAACAUU | NM_006241 |
| 4580 | PPP1R2 | UGAUGAUGAUGAAGAUGAA | NM_006241 |
| 4581 | PPP1R2 | CCUACAUGAUGAUGAUGAA | NM_006241 |
| 4582 | PPP1R2 | CUUAGAAAGUACCCACAUA | NM_006241 |
| 4583 | PPP1R2 | GAAUGUACAGACAGAAGUA | NM_006241 |
| 4584 | PPP1R2 | UGAUGAAGAUGAAGAAAUG | NM_006241 |
| 4585 | PPP1R2 | GUAUCAUCCAGCAGACAAA | NM_006241 |
| 4586 | PPP1R2 | UCGACGAGGAGCUGAGCAA | NM_006241 |
| 4587 | PPP1R2 | GGUAAUUGAUAGGGUAUGA | NM_006241 |
| 4588 | PPP1R2 | GGUUUCAUUUCUAGCCAUA | NM_006241 |
| 4589 | PPP1R2 | GGAAACAGCAGUAUUUGAA | NM_006241 |
| 4590 | PPP1R2 | CAUGAAUACGGAAGAAUCA | NM_006241 |
| 4591 | PPP1R2 | CCAAUUGAACAACAGGAUA | NM_006241 |
| 4592 | PPP1R2 | AAGAGUUACUGUUGCAUUU | NM_006241 |
| 4593 | PPP1R2 | AUGAAGGACUCAAUAUCAA | NM_006241 |
| 4594 | PPP1R3C | GGAGAAAGAAGAUGAAUUA | NM_005398 |
| 4595 | PPP1R3C | CAACAAUGAUGGUCAGAAU | NM_005398 |
| 4596 | PPP1R3C | GGGCAAGUCUUUUGGGACA | NM_005398 |
| 4597 | PPP1R3C | GAUCAUUGUUGGUGGAAAA | NM_005398 |
| 4598 | PPP1R3C | GAAAGACACUUGAGAAUUU | NM_005398 |
| 4599 | PPP1R3C | GAAAAGUACUAUCGGAAUA | NM_005398 |
| 4600 | PPP1R3C | AGGCAUUCCUCCUGCAAUA | NM_005398 |
| 4601 | PPP1R3C | GAAUCAAGAUCUUAAGUGA | NM_005398 |
| 4602 | PPP1R3C | CCAGAAUGAUCCAGGUUUU | NM_005398 |
| 4603 | PPP1R3C | GAUCUUAAGUGAAGCCUUU | NM_005398 |
| 4604 | PPP1R3C | ACAAUGAUGGUCAGAAUUA | NM_005398 |
| 4605 | PPP1R3C | AAUUAUAGCUCCGGAGAAU | NM_005398 |
| 4606 | PPP1R3C | CGGAAUAACUCUGCAGUGA | NM_005398 |
| 4607 | PPP1R3C | GACGACAUUUUGUGAAUAA | NM_005398 |
| 4608 | PPP1R3C | CAUCAUUAAUGGCUAACAA | NM_005398 |
| 4609 | PPP1R3C | GAAUAACUCUGCAGUGACA | NM_005398 |
| 4610 | PPP1R3C | GUGUAUGGUGGCACAGAUA | NM_005398 |
| 4611 | PPP1R3C | GAUGGAAAGCUGUGUUAAU | NM_005398 |
| 4612 | PPP1R3C | AGACAGAGUUAGAGUCAAC | NM_005398 |
| 4613 | PPP1R3C | CUAAUGAGCUGCACCAGAA | NM_005398 |
| 4614 | PPP1R3C | UCUGUAGGAUCUUAAGAAA | NM_005398 |
| 4615 | PPP1R3C | AAAGAAAGACACUUGAGAA | NM_005398 |
| 4616 | PPP1R3C | GGGACAACAAUGAUGGUCA | NM_005398 |
| 4617 | PPP1R3C | UCUGGUAACUCAUGGGUUU | NM_005398 |
| 4618 | PPP1R3C | CAAGAAGCGCGUUGUGUUU | NM_005398 |
| 4619 | PPP1R3C | CUGAAAUCAUGUCUCAAUA | NM_005398 |
| 4620 | PPP1R3C | AAGCCAAAUCACAGAAUGA | NM_005398 |
| 4621 | PPP1R3C | CAGAAGAACCAGCGUGGGA | NM_005398 |
| 4622 | PPP1R3C | GGAUGUGACUUGUUUUGAA | NM_005398 |
| 4623 | PPP1R3C | GCAAGAGCGAACAGUGACA | NM_005398 |
| 4624 | PPP1R3D | CAGGAAUAUUCUCGAUUUA | NM_006242 |
| 4625 | PPP1R3D | GGAGCAAGGUGGCGAACCA | NM_006242 |
| 4626 | PPP1R3D | CUGAAUGUGUCUCUGUAAA | NM_006242 |
| 4627 | PPP1R3D | CCGAGUACUGGGACAACAA | NM_006242 |
| 4628 | PPP1R3D | UGGCACAGGUCAAGGUGUU | NM_006242 |
| 4629 | PPP1R3D | CGGAGGACCUGGACAAGGA | NM_006242 |
| 4630 | PPP1R3D | GCAACGUGGCCUUCGAGAA | NM_006242 |
| 4631 | PPP1R3D | GUACGGUGCGCGUGUGCAA | NM_006242 |
| 4632 | PPP1R3D | GAAGAGAGCUGGAUCCACU | NM_006242 |
| 4633 | PPP1R3D | AGAAGGCCGAGUUGUGUAA | NM_006242 |
| 4634 | PPP1R3D | CAGAAGGCCGAGUUGUGUA | NM_006242 |
| 4635 | PPP1R3D | UCAGGAAUAUUCUCGAUUU | NM_006242 |
| 4636 | PPP1R3D | UUGCAUGUGUCCUGAAUGU | NM_006242 |
| 4637 | PPP1R3D | CGAGUUGUGUAAUGAGUUG | NM_006242 |
| 4638 | PPP1R3D | CCUCAGGAAUAUUCUCGAU | NM_006242 |
| 4639 | PPP1R3D | CUGAGUCACUUGUCUAAAA | NM_006242 |
| 4640 | PPP1R3D | GAAUGUGUCUCUGUAAACA | NM_006242 |
| 4641 | PPP1R3D | GCAUGUGUCCUGAAUGUGU | NM_006242 |
| 4642 | PPP1R3D | ACAUCUAUCUGGUUGUUCU | NM_006242 |
| 4643 | PPP1R3D | UGUCGCGGCUCGCAAUCAA | NM_006242 |
| 4644 | PPP1R3D | AGGCCGAGUUGUGUAAUGA | NM_006242 |
| 4645 | PPP1R3D | UGGCUGUGCGCUACACUUU | NM_006242 |
| 4646 | PPP1R3D | CAACGACCACCGAGACUAC | NM_006242 |
| 4647 | PPP1R3D | GCCAGAAGGCCGAGUUGUG | NM_006242 |
| 4648 | PPP1R3D | CAGAUACGGUGGACUCUCU | NM_006242 |
| 4649 | PPP1R3D | GCACAGGUCAAGGUGUUCA | NM_006242 |
| 4650 | PPP1R3D | GCCGAGUUGUGUAAUGAGU | NM_006242 |
| 4651 | PPP1R3D | CAUCCUGUCUUCUACUUGA | NM_006242 |
| 4652 | PPP1R3D | GUCGGGAGGUCGUCUCUCA | NM_006242 |
| 4653 | PPP1R3D | CUGCUGGGCUCUCACAUCU | NM_006242 |
| 4654 | PPP1R7 | GGACAGAGAUGCAGAGGAU | NM_002712 |
| 4655 | PPP1R7 | CUUUUAAUCUGCUGAGAAA | NM_002712 |
| 4656 | PPP1R7 | UAACCAACCUGGAGAGUUU | NM_002712 |
| 4657 | PPP1R7 | GAUUGAAGGAUUUGAGGUA | NM_002712 |
| 4658 | PPP1R7 | GAUUUGAGGUACUGAAGAA | NM_002712 |
| 4659 | PPP1R7 | CUGCAAGAGUUCUGGAUGA | NM_002712 |
| 4660 | PPP1R7 | CAGUGUACCUGGAGCGGAA | NM_002712 |
| 4661 | PPP1R7 | CCAUCAACCUGGACAGAGA | NM_002712 |
| 4662 | PPP1R7 | UAACAGAGCUGGAGAUUCU | NM_002712 |
| 4663 | PPP1R7 | AGGGAAGAUUGAAGGAUUU | NM_002712 |
| 4664 | PPP1R7 | GAACAGAGCCUGAAGGAUG | NM_002712 |
| 4665 | PPP1R7 | CAAUAAAGGCACUGACGAU | NM_002712 |
| 4666 | PPP1R7 | UCACAAACCCAAUGGCAAU | NM_002712 |
| 4667 | PPP1R7 | GGACAUUGCAUCAAAUAGA | NM_002712 |
| 4668 | PPP1R7 | AGGAGAUGAUGGAGGUUGA | NM_002712 |
| 4669 | PPP1R7 | CGAUGAAGAAGGGAAGAAA | NM_002712 |
| 4670 | PPP1R7 | GCUGGAGAUUCUAGAUAUU | NM_002712 |
| 4671 | PPP1R7 | GGAGGAGGACCCAGAAGAA | NM_002712 |
| 4672 | PPP1R7 | UAACAGAGCUGCAAGAGUU | NM_002712 |
| 4673 | PPP1R7 | UAGGGAAGAUUGAAGGAUU | NM_002712 |
| 4674 | PPP1R7 | UCGAGGGCCUGGAGAACAA | NM_002712 |
| 4675 | PPP1R7 | CAGCAACAGUCGCAGGAGA | NM_002712 |
| 4676 | PPP1R7 | GAAGAAGGGAAGAAACACA | NM_002712 |
| 4677 | PPP1R7 | UGAAGAAAGUGAAGACUCU | NM_002712 |
| 4678 | PPP1R7 | GCGAUGAAGAAGGGAAGAA | NM_002712 |
| 4679 | PPP1R7 | CAAGUUGACACGACUGAAA | NM_002712 |
| 4680 | PPP1R7 | UGGAGGAGCUACAGAGUCU | NM_002712 |
| 4681 | PPP1R7 | AUGCAGAGGAUGUUGAUUU | NM_002712 |
| 4682 | PPP1R7 | UGAAGAAUCCGGCGAUGAA | NM_002712 |
| 4683 | PPP1R7 | UCUUCUUGGUCAACAAUAA | NM_002712 |
| 4684 | PPP1R8 | CCAAAGAGGAAGAGGAAGA | NM_138558 |
| 4685 | PPP1R8 | GCAGUUAAGCUGAGGUUUA | NM_014110 |
| 4686 | PPP1R8 | CUAAUGAACUAGGGAGAAA | NM_002713 |
| 4687 | PPP1R8 | GAAGAUGGGUGGAGAGGAU | NM_014110 |
| 4688 | PPP1R8 | UGAUAGAUCUCAACAGUAA | NM_002713 |
| 4689 | PPP1R8 | GCUCAAAGGCGCUCACUUA | NM_002713 |
| 4690 | PPP1R8 | GCGAGAAGCCUCAGACAUU | NM_014110 |
| 4691 | PPP1R8 | AGACACAGGUUUAUAGUUU | NM_138558 |
| 4692 | PPP1R8 | GAGACAAACUAAUUGAGAA | NM_002713 |
| 4693 | PPP1R8 | AAGCUGAGGUUUAAACUAA | NM_138558 |
| 4694 | PPP1R8 | AUUCAGAGCUCCAAGACUA | NM_014110 |
| 4695 | PPP1R8 | GACCAAAGAGGAAGAGGAA | NM_138558 |
| 4696 | PPP1R8 | UAAAUGAACCCAAGAAGAA | NM_014110 |
| 4697 | PPP1R8 | GAAGAGAGUUUUCCUGAUA | NM_002713 |
| 4698 | PPP1R8 | GCUUAGAAUUCUGCAGUUA | NM_002713 |
| 4699 | PPP1R8 | GGAAAAGAUUUGUUUGGAA | NM_138558 |
| 4700 | PPP1R8 | GGGUGCAGGCUGUGAAUUU | NM_014110 |
| 4701 | PPP1R8 | GUAAAUGAACCCAAGAAGA | NM_002713 |
| 4702 | PPP1R8 | AGUCAAAGGAGACAAACUA | NM_002713 |
| 4703 | PPP1R8 | GGGUUGAAAUAGCCCAUAA | NM_002713 |
| 4704 | PPP1R8 | GGAAGUAACUGGUGUCUCU | NM_002713 |
| 4705 | PPP1R8 | UAGCAGAAGGGUUGCCAUA | NM_002713 |
| 4706 | PPP1R8 | UGCCAUAGACACAGGUUUA | NM_002713 |
| 4707 | PPP1R8 | CAAAUAAAGAUGCCCUAAA | NM_014110 |
| 4708 | PPP1R8 | GAGACAAAGUUAGGAAACA | NM_014110 |
| 4709 | PPP1R8 | UUACCAUUGAGGAGGGAAA | NM_014110 |
| 4710 | PPP1R8 | AACCCAAGAAGAAGAAAUA | NM_014110 |
| 4711 | PPP1R8 | GCAGAAGGGUUGCCAUAGA | NM_138558 |
| 4712 | PPP1R8 | AUCCAGAGCUGUAGAGGUU | NM_014110 |
| 4713 | PPP1R8 | UAACAAACAUAGGAGACAA | NM_014110 |
| 4714 | PPP2CA | CUAAAGAAAUCCUGACAAA | NM_002715 |
| 4715 | PPP2CA | GUUUAGAAUUGGUGGCAAA | NM_002715 |
| 4716 | PPP2CA | CAGAUUAACUUCAGGAUUU | NM_002715 |
| 4717 | PPP2CA | GGAAAUGGGAAGAGCAACA | NM_002715 |
| 4718 | PPP2CA | CGACAUUGUUGGUCAAGAA | NM_002715 |
| 4719 | PPP2CA | GCGAGAAGGCUAAAGAAAU | NM_002715 |
| 4720 | PPP2CA | AGCUAGUGAUGGAGGGAUA | NM_002715 |
| 4721 | PPP2CA | GCAAAUCACCAGAUACAAA | NM_002715 |
| 4722 | PPP2CA | GCAAGAUAUUUCUGAGACA | NM_002715 |
| 4723 | PPP2CA | AGAUAAGGAUAGCAGCAAA | NM_002715 |
| 4724 | PPP2CA | CGAGAAGGCUAAAGAAAUC | NM_002715 |
| 4725 | PPP2CA | GGAUAUAACUGGUGCCAUG | NM_002715 |
| 4726 | PPP2CA | GGGCAAGACUGGUGCUGUU | NM_002715 |
| 4727 | PPP2CA | CUGAGAAGGUCAAAUUUUA | NM_002715 |
| 4728 | PPP2CA | GGGAAGAGCAACAGUAACU | NM_002715 |
| 4729 | PPP2CA | CUGAGAGACUGCAGAUAAU | NM_002715 |
| 4730 | PPP2CA | UCACACAAGUUUAUGGUUU | NM_002715 |
| 4731 | PPP2CA | GCUUGUAGCUCUUAAGGUU | NM_002715 |
| 4732 | PPP2CA | GGAAUGUAGUAACGAUUUU | NM_002715 |
| 4733 | PPP2CA | UCAUGGAACUGUUUAGAAU | NM_002715 |
| 4734 | PPP2CA | UGGCAAAUCACCAGAUACA | NM_002715 |
| 4735 | PPP2CA | GGGAGAUUAUGUUGACAGA | NM_002715 |
| 4736 | PPP2CA | CAGCAUGACUGUAGAUAAG | NM_002715 |
| 4737 | PPP2CA | CUGCAGAUAAUAAGAUGUA | NM_002715 |
| 4738 | PPP2CA | AAUCAAGGGCACUACAUAA | NM_002715 |
| 4739 | PPP2CA | CUACAUAACCUCUCUGGUA | NM_002715 |
| 4740 | PPP2CA | GAGAGACUGCAGAUAAUAA | NM_002715 |
| 4741 | PPP2CA | GGAUCGAGCAGCUGAACGA | NM_002715 |
| 4742 | PPP2CA | UUUGUAGACUUGUAGGUAA | NM_002715 |
| 4743 | PPP2CA | GGAUCAUAUCAGAGCACUU | NM_002715 |
| 4744 | PPP2CB | GCGAGAAGGCAAAGGAAAU | NM_004156 |
| 4745 | PPP2CB | CUUUAGAAUUGGUGGAAAA | NM_004156 |
| 4746 | PPP2CB | CUAUGUAGACAGAGGAUAU | NM_004156 |
| 4747 | PPP2CB | UUUAGUAGAUGGACAGAUA | NM_004156 |
| 4748 | PPP2CB | UAGCAUUAAAGGUGCGUUA | NM_004156 |
| 4749 | PPP2CB | CUUUGUAUGUGGAAGUAUA | NM_004156 |
| 4750 | PPP2CB | GGAAUUAGAUGACACUUUA | NM_004156 |
| 4751 | PPP2CB | UCACGAAAGCCGACAAAUU | NM_004156 |
| 4752 | PPP2CB | AGCUUGUAAUGGAGGGAUA | NM_004156 |
| 4753 | PPP2CB | CCAUAGACACACUGGAUCA | NM_004156 |
| 4754 | PPP2CB | CGACAAAUUACCCAAGUAU | NM_004156 |
| 4755 | PPP2CB | CAGCUUUAGUAGAUGGACA | NM_004156 |
| 4756 | PPP2CB | GUAAGCAGCUGAACGAGAA | NM_004156 |
| 4757 | PPP2CB | GAAAAUCACCGGAUACAAA | NM_004156 |
| 4758 | PPP2CB | ACUUACAGCUUUAGUAGAU | NM_004156 |
| 4759 | PPP2CB | CGAGAAGGCAAAGGAAAUU | NM_004156 |
| 4760 | PPP2CB | GUUUAACUGGCAUGGAUUA | NM_004156 |
| 4761 | PPP2CB | CACGAAAGCCGACAAAUUA | NM_004156 |
| 4762 | PPP2CB | CCGACAAAUUACCCAAGUA | NM_004156 |
| 4763 | PPP2CB | UGCGAGAAGGCAAAGGAAA | NM_004156 |
| 4764 | PPP2CB | UGGAAUUAGAUGACACUUU | NM_004156 |
| 4765 | PPP2CB | AGACAGAGGAUAUUAUUCA | NM_004156 |
| 4766 | PPP2CB | AUGAUGAAUGUCUGCGAAA | NM_004156 |
| 4767 | PPP2CB | GACAAAUUACCCAAGUAUA | NM_004156 |
| 4768 | PPP2CB | CCAGAACGCAUUACAAUAU | NM_004156 |
| 4769 | PPP2CB | GGGUCGAGCAGCUGAACGA | NM_004156 |
| 4770 | PPP2CB | ACUACUUAUUCAUGGGUGA | NM_004156 |
| 4771 | PPP2CB | GUGGAGAUGUGCAUGGUCA | NM_004156 |
| 4772 | PPP2CB | GAUGAAUGUCUGCGAAAGU | NM_004156 |
| 4773 | PPP2CB | UGGCAUGGAUUAAUAGAGU | NM_004156 |
| 4774 | PPP2R1A | UGAAGAAGCUAGUGGAAAA | NM_014225 |
| 4775 | PPP2R1A | GUCAAAGAGUUCUGUGAAA | NM_014225 |
| 4776 | PPP2R1A | ACAGAGAAAUAAAGGUCUA | NM_014225 |
| 4777 | PPP2R1A | UGGACAACGUCAAGAGUGA | NM_014225 |
| 4778 | PPP2R1A | GGAUGAGUGCCCUGAGGUA | NM_014225 |
| 4779 | PPP2R1A | GAGAAAUAAAGGUCUAGAA | NM_014225 |
| 4780 | PPP2R1A | GCUACAUGGUGGCUGACAA | NM_014225 |
| 4781 | PPP2R1A | CCACAAGGUCAAAGAGUUC | NM_014225 |
| 4782 | PPP2R1A | AGACAGUGGUGCGGGACAA | NM_014225 |
| 4783 | PPP2R1A | AGGAUGUGGACGUCAAAUA | NM_014225 |
| 4784 | PPP2R1A | CUGAAGAAGCUAGUGGAAA | NM_014225 |
| 4785 | PPP2R1A | GAGUGGAGUUCUUUGAUGA | NM_014225 |
| 4786 | PPP2R1A | GGUCAAAGAGUUCUGUGAA | NM_014225 |
| 4787 | PPP2R1A | UGGCUCAGCUGAAGGAUGA | NM_014225 |
| 4788 | PPP2R1A | UGGCCUGGCUUGUGGAUCA | NM_014225 |
| 4789 | PPP2R1A | CCUGAAGAAGCUAGUGGAA | NM_014225 |
| 4790 | PPP2R1A | UCACAGAGCUCCAGAAAGC | NM_014225 |
| 4791 | PPP2R1A | GCUUGUGGAUCAUGUAUAU | NM_014225 |
| 4792 | PPP2R1A | GAAAUAAAGGUCUAGAAGU | NM_014225 |
| 4793 | PPP2R1A | GCAUCAAUGUGCUGUCUGA | NM_014225 |
| 4794 | PPP2R1A | UGGCAGAACAGCUGGGAAC | NM_014225 |
| 4795 | PPP2R1A | GUUCACAGAGCUCCAGAAA | NM_014225 |
| 4796 | PPP2R1A | UGGCCAAGUCUCUGCAGAA | NM_014225 |
| 4797 | PPP2R1A | GGGUUGGACAGGACAGUGA | NM_014225 |
| 4798 | PPP2R1A | GGGACAAGGCAGUGGAGUC | NM_014225 |
| 4799 | PPP2R1A | UGAACGAGGUGAUUGGCAU | NM_014225 |
| 4800 | PPP2R1A | CCAAGGUGCUGGAGCUGGA | NM_014225 |
| 4801 | PPP2R1A | UGAAAGACUGUGAGGCCGA | NM_014225 |
| 4802 | PPP2R1A | UCCAGAACCUGAUGAAAGA | NM_014225 |
| 4803 | PPP2R1A | CCACCAGCAACCUGAAGAA | NM_014225 |
| 4804 | PPP2R1B | GGAAAUAACUACUAAGCAA | NM_002716 |
| 4805 | PPP2R1B | GCAAAUUAAUAGUGAGGAA | NM_002716 |
| 4806 | PPP2R1B | GGAAUUAGACAGUGUGAAA | NM_002716 |
| 4807 | PPP2R1B | CAUAAUAGGUGCUCAAUAA | NM_002716 |
| 4808 | PPP2R1B | GAGUUAAGCUGAAGAGUUU | NM_002716 |
| 4809 | PPP2R1B | GCAACAACUUAGAAGAAAU | NM_002716 |
| 4810 | PPP2R1B | GAAGUUAGGUCAAGAUGAA | NM_002716 |
| 4811 | PPP2R1B | GGGUGAUACUGGAGUCUUA | NM_002716 |
| 4812 | PPP2R1B | CGGGAGACAUGUUGAGAUU | NM_002716 |
| 4813 | PPP2R1B | GAUAAUGAGUUAAGCUGAA | NM_002716 |
| 4814 | PPP2R1B | GCAUUAGUCUCAUGUGAAA | NM_002716 |
| 4815 | PPP2R1B | GAAGAUAGAGAGACGAUAA | NM_002716 |
| 4816 | PPP2R1B | GGGUGGAGAUGGAGAUGAU | NM_181699 |
| 4817 | PPP2R1B | GUGAAUAUGUGGUUUCUAA | NM_002716 |
| 4818 | PPP2R1B | AGGAUGACCUUGAGACUUU | NM_181699 |
| 4819 | PPP2R1B | AGAAAGGACCCGAAGUGAA | NM_002716 |
| 4820 | PPP2R1B | GAAAGGACCCGAAGUGAAU | NM_002716 |
| 4821 | PPP2R1B | GGAUAAUACUGUGCAGAUU | NM_002716 |
| 4822 | PPP2R1B | GGCCAAGAAUUAAGUAUUU | NM_002716 |
| 4823 | PPP2R1B | GAUAGAGAGACCAUAAUUA | NM_181699 |
| 4824 | PPP2R1B | CCAACAACCUCAUGAAACU | NM_002716 |
| 4825 | PPP2R1B | CCUCUAAGACUUUGUAUAU | NM_002716 |
| 4826 | PPP2R1B | ACAAGCAGCAGAAGAUAAA | NM_002716 |
| 4827 | PPP2R1B | AAGUGUUAGUAAUGGCAAA | NM_002716 |
| 4828 | PPP2R1B | CUAACGAGGUCUUGUUGAA | NM_002716 |
| 4829 | PPP2R1B | GAGGACGAAUAGAGUUUAA | NM_002716 |
| 4830 | PPP2R1B | GAUCCUAAUUACUUGCAUA | NM_002716 |
| 4831 | PPP2R1B | CAGGAGACCAAGUAGCAAA | NM_181699 |
| 4832 | PPP2R1B | CCUAAUUACUUGCAUAGAA | NM_002716 |
| 4833 | PPP2R1B | GGUGAAACGCUUAGCAAGU | NM_181699 |
| 4834 | PPP2R2A | GCGAAAGAAAGAUGAAAUA | NM_002717 |
| 4835 | PPP2R2A | GCAGAUGAUUUGCGGAUUA | NM_002717 |
| 4836 | PPP2R2A | UCAGAAUGUUUGACAGAAA | NM_002717 |
| 4837 | PPP2R2A | AGAUAAAGGUGGUAGAGUU | NM_002717 |
| 4838 | PPP2R2A | CUAGAAGCAUCGCGGGAAA | NM_002717 |
| 4839 | PPP2R2A | AGACAUAACCCUAGAAGCA | NM_002717 |
| 4840 | PPP2R2A | CAGCAGAAUUUCAUCCAAA | NM_002717 |
| 4841 | PPP2R2A | GCACUGAAAAUAAGGAAAA | NM_002717 |
| 4842 | PPP2R2A | AAACACAAAGCGAGACAUA | NM_002717 |
| 4843 | PPP2R2A | GGAGAAAGCUCUGUGGAUU | NM_002717 |
| 4844 | PPP2R2A | GUGCAAGUGGCAAGCGAAA | NM_002717 |
| 4845 | PPP2R2A | CAUGAAUACCUCAGAAGUA | NM_002717 |
| 4846 | PPP2R2A | GGACUAGAUUGGACUGUAU | NM_002717 |
| 4847 | PPP2R2A | GAUUACAGCAGCAGAAUUU | NM_002717 |
| 4848 | PPP2R2A | AGAUGAUGAUGUAGCAGAA | NM_002717 |
| 4849 | PPP2R2A | GAUGGAAGGUAUAGAGAUC | NM_002717 |
| 4850 | PPP2R2A | ACUAGCAACAGGAGAUAAA | NM_002717 |
| 4851 | PPP2R2A | CCAAACAGCUGUAACACAU | NM_002717 |
| 4852 | PPP2R2A | GAAAGGAGCAGUAGAUGAU | NM_002717 |
| 4853 | PPP2R2A | UAAAGGAACUAUUCGGCUA | NM_002717 |
| 4854 | PPP2R2A | AAACAUACCAGGUGCAUGA | NM_002717 |
| 4855 | PPP2R2A | AGACAGGAGUUUUAACAUU | NM_002717 |
| 4856 | PPP2R2A | CAAAAGACCAGAAGGGUAU | NM_002717 |
| 4857 | PPP2R2A | GGUGAAAGGAGCAGUAGAU | NM_002717 |
| 4858 | PPP2R2A | CCUCAUUACUGUAUCAUUU | NM_002717 |
| 4859 | PPP2R2A | GGCCAGUCCACGAAGAAUA | NM_002717 |
| 4860 | PPP2R2A | CAUACCAGGUGCAUGAAUA | NM_002717 |
| 4861 | PPP2R2A | GGUGAUUACAGCAGCAGAA | NM_002717 |
| 4862 | PPP2R2A | GGGUAUAACUUGAAAGAGG | NM_002717 |
| 4863 | PPP2R2A | UAUGAUGACUAGAGACUAU | NM_002717 |
| 4864 | PPP2R2B | CCUGAAGAGUUUAGAAAUA | NM_004576 |
| 4865 | PPP2F2B | GCUGAUGACCUGAGGAUUA | NM_004576 |
| 4866 | PPP2R2B | CAUUUAAGCCAGAGAUUUA | NM_004576 |
| 4867 | PPP2R2B | GGAAAUGAUUGGAAUAGAA | NM_004576 |
| 4868 | PPP2R2B | AGAAACAGCCUGAGAAUUU | NM_004576 |
| 4869 | PPP2R2B | CUUGAGGCUUCGAGGGAAA | NM_181677 |
| 4870 | PPP2R2B | GGACAGAAAGAGAGCACUU | NM_004576 |
| 4871 | PPP2R2B | AACGAGAGCAGGAGAGUAA | NM_004576 |
| 4872 | PPP2R2B | CCUAUGGAACUUUGAAAUA | NM_004576 |
| 4873 | PPP2R2B | GGACAUUGAUACCCGCAAA | NM_004576 |
| 4874 | PPP2R2B | UCGAUUACCUGAAGAGUUU | NM_004576 |
| 4875 | PPP2R2B | AGAAGAGGAUGCAGAAUGA | NM_004576 |
| 4876 | PPP2R2B | GAAAACUGGUUCUGGGUUA | NM_004576 |
| 4877 | PPP2R2B | CAACCACACGGGAGAAUUA | NM_004576 |
| 4878 | PPP2R2B | GAAAUGAACUGUGGGGAAA | NM_004576 |
| 4879 | PPP2R2B | UOAGGAUGUUCGACAGAAA | NM_181675 |
| 4880 | PPP2R2B | AGUUGAGGAUCCAGAUUUA | NM_004576 |
| 4881 | PPP2R2B | GGGAGAAUUACUAGCGACA | NM_181675 |
| 4882 | PPP2R2B | UUUGUAAGCUCCAUAGAAA | NM_004576 |
| 4883 | PPP2R2B | GGAAAGUCAGCGAGCGUGA | NM_004576 |
| 4884 | PPP2R2B | GGAGAAAAGAGAUAAGUUU | NM_004576 |
| 4885 | PPP2R2B | CCAGAGAUUUAUUGCAUGA | NM_004576 |
| 4886 | PPP2R2B | CGACCGAAGCUGACAUUAU | NM_004576 |
| 4887 | PPP2R28 | AACCAGAACUAGUCAGUAU | NM_004576 |
| 4888 | PPP2R2B | GGUAAAUGGUUUGAGAUGA | NM_004576 |
| 4889 | PPP2R2B | GGCACUAAAUGCAUGCAAA | NM_004576 |
| 4890 | PPP2R2B | ACAGAAACACCAAGCGUGA | NM_181674 |
| 4891 | PPP2R2B | GGACAAUCCGGCUGUGUGA | NM_004576 |
| 4892 | PPP2R2B | AUAAGAGGCCAGAAGGCUA | NM_004576 |
| 4893 | PPP2R2B | GCUGUGACAUGAAGUGAAU | NM_004576 |
| 4894 | PPP2R3A | GGAGAAAGUUGCUGAAUAA | NM_002718 |
| 4895 | PPP2R3A | GGAAGAAGAGGAAGAUAUA | NM_002718 |
| 4896 | PPP2R3A | GGAAAGAAAGCAUUAGAUA | NM_002718 |
| 4897 | PPP2R3A | GGAUAUUGAAGAACAGAAA | NM_002718 |
| 4898 | PPP2R3A | GGAAAAUGAUACAGCUAUA | NM_002718 |
| 4899 | PPP2R3A | UGACUUAGCCCUAGUAAUA | NM_002718 |
| 4900 | PPP2R3A | GAAACAAGUUCUAGAAAGU | NM_002718 |
| 4901 | PPP2R3A | GAACAAACUCUAAGCAGAA | NM_002718 |
| 4902 | PPP2R3A | GGUGAUAAAGCCAAAGAUA | NM_002718 |
| 4903 | PPP2R3A | AGAAAGGGAAGGAAAGUUA | NM_002718 |
| 4904 | PPP2R3A | AGACUUUGCUCAAGAACUA | NM_002718 |
| 4905 | PPP2R3A | CAGGAUUAUUGAAAGGAUA | NM_181897 |
| 4906 | PPP2R3A | UGGAGAAAGUUGCUGAAUA | NM_002718 |
| 4907 | PPP2R3A | CAGAAUACCUACAACUUAA | NM_002718 |
| 4908 | PPP2R3A | CAUAGAAACUCACUGGAUA | NM_002718 |
| 4909 | PPP2R3A | CCAAACAACUCCACAAAUU | NM_002718 |
| 4910 | PPP2R3A | AGGAAGGCUUUGAAGAUUA | NM_002718 |
| 4911 | PPP2R3A | UAAUGAGGCUCUAGAUUUA | NM_002718 |
| 4912 | PPP2R3A | GACCAAACCUCAAAUAUAA | NM_002718 |
| 4913 | PPP2R3A | AGAGAAAUGUGGAAAGCUU | NM_002718 |
| 4914 | PPP2R3A | UGGAAGAAGAGGAAGAUAU | NM_002718 |
| 4915 | PPP2R3A | AGUAAAGGCCUCAACGUUA | NM_002718 |
| 4916 | PPP2R3A | AAUCAGUGGAUGAAGAAUA | NM_002718 |
| 4917 | PPP2R3A | CAGAAAGAGGGAAGAAUGA | NM_002718 |
| 4918 | PPP2R3A | CUGUAGUAAUCAUGAACAA | NM_002718 |
| 4919 | PPP2R3A | GCAGAAAACUUGAGUCAGA | NM_002718 |
| 4920 | PPP2R3A | GGAUCUACAUUUCAGAAUA | NM_002718 |
| 4921 | PPP2R3A | AGAAGGAUGUUGAGAACGA | NM_002718 |
| 4922 | PPP2R3A | GCAUGGAUGUGGAUGGAGA | NM_002718 |
| 4923 | PPP2R3A | AGAAAUACUUAGACCAUGA | NM_002718 |
| 4924 | PPP2R4 | AGGGAAGGGAGGAGAGAUA | NM_021131 |
| 4925 | PPP2R4 | CCUCAUUGCUGUUCAGAUU | NM_021131 |
| 4926 | PPP2R4 | AUGAGAAGGCCGUGAAUGA | NM_021131 |
| 4927 | PPP2R4 | UGCCAAACUUGAUGAGGAA | NM_021131 |
| 4928 | PPP2R4 | GGUUUGGGAAUAAGGCAUA | NM_021131 |
| 4929 | PPP2R4 | CCAGACACUUUGUGGAUGA | NM_021131 |
| 4930 | PPP2R4 | CCGAGUGCCUGGAGAAGUU | NM_021131 |
| 4931 | PPP2R4 | AUGAGAACCACAAGGACUA | NM_178002 |
| 4932 | PPP2R4 | GAGAAGUGACCAAAGUGUA | NM_021131 |
| 4933 | PPP2R4 | GAGUGUAUCCUGUUUAUUA | NM_178000 |
| 4934 | PPP2R4 | ACAUGUUCCUGGAGUGUAU | NM_021131 |
| 4935 | PPP2R4 | CCAAAGUGAACCAGGGUCU | NM_021131 |
| 4936 | PPP2R4 | GUGGAUGACCAAAUAGCUA | NM_021131 |
| 4937 | PPP2R4 | GAUGAAGACUGGCCCAUUU | NM_021131 |
| 4938 | PPP2R4 | ACGAAGGUGUGAAGGGGAA | NM_178000 |
| 4939 | PPP2R4 | GCUCACUUGUCUUCAGGAA | NM_021131 |
| 4940 | PPP2R4 | GAGAAGGCCGUGAAUGAGA | NM_021131 |
| 4941 | PPP2R4 | CCACACAGUUCCAGACAUG | NM_021131 |
| 4942 | PPP2R4 | UAAAGGAGUCAGUGGGGAA | NM_021131 |
| 4943 | PPP2R4 | AGGCAUACGCUGACUACAU | NM_021131 |
| 4944 | PPP2R4 | GCGCAUUGACUACGGCACA | NM_021131 |
| 4945 | PPP2R4 | GGAAGCGUUCUCAGGCAUA | NM_021131 |
| 4946 | PPP2R4 | GAUUAAAGCCUCUGUUUUG | NM_021131 |
| 4947 | PPP2R4 | CCUUGAGGUUAUGCGGAAA | NM_021131 |
| 4948 | PPP2R4 | GGUCUCAUCCGCAUGUAUA | NM_021131 |
| 4949 | PPP2R4 | CCGGGUGGAUGACCAAAUA | NM_021131 |
| 4950 | PPP2R4 | CCGUGAAUGAGAACCACAA | NM_021131 |
| 4951 | PPP2R4 | UCAUUGCUGUUCAGAUUAA | NM_021131 |
| 4952 | PPP2R4 | GGACCAGCCCUCUCGGUUU | NM_021131 |
| 4953 | PPP2R4 | CCUCUCGGUUUGGGAAUAA | NM_021131 |
| 4954 | PPP2RSA | GCACCGAAUUUAUGGGAAA | NM_006243 |
| 4955 | PPP2RSA | GCUGAAAGACAGAGAGAGA | NM_006243 |
| 4956 | PPP2R5A | UGAAAGACAGAGAGAGAAA | NM_006243 |
| 4957 | PPP2R5A | UGGGAAAUUUCUUGGAUUA | NM_006243 |
| 4958 | PPP2R5A | GCAUUGUACUUCUGGAAUA | NM_006243 |
| 4959 | PPP2RSA | GGAGAAAGAUACAACACUA | NM_006243 |
| 4960 | PPP2R5A | CAAUACAAGUGCCGAAUAA | NM_006243 |
| 4961 | PPP2R5A | GGAAUUGGAACGUGAAGAA | NM_006243 |
| 4962 | PPP2R5A | CGGAGAAAGUGGACGGCUU | NM_006243 |
| 4963 | PPP2R5A | CCUUAAAUCUCCAGGCUUU | NM_006243 |
| 4964 | PPP2R5A | AAACAAACCUCAUCAGUAU | NM_006243 |
| 4965 | PPP2R5A | CGUGAAGAAUUAUGGAAAA | NM_006243 |
| 4966 | PPP2R5A | GAGAAAGAUACAACACUAA | NM_006243 |
| 4967 | PPP2R5A | GGAAAUGAAUGGCAAGCUU | NM_006243 |
| 4968 | PPP2R5A | ACUGAAAGCAGAACAUAAA | NM_006243 |
| 4969 | PPP2R5A | AUUGGAACGUGAAGAAUUA | NM_006243 |
| 4970 | PPP2R5A | UGAAUGAACUGGUUGAGUA | NM_006243 |
| 4971 | PPP2R5A | CUAAAGAAAGCUCUAGAAA | NM_006243 |
| 4972 | PPP2R5A | ACGUGAAGAAUUAUGGAAA | NM_006243 |
| 4973 | PPP2R5A | CUGAAAACCCUAAUGGAAA | NM_006243 |
| 4974 | PPP2R5A | CUUGAAGAGCAAAGAAAUU | NM_006243 |
| 4975 | PPP2R5A | CUGAAAAGGUUGACUAUAU | NM_006243 |
| 4976 | PPP2RSA | GAAUGAACUGGUUGAGUAU | NM_006243 |
| 4977 | PPP2R5A | UGGUGUAAUUGUUGAAUCA | NM_006243 |
| 4978 | PPP2R5A | AGAAGGAAUUGGAACGUGA | NM_006243 |
| 4979 | PPP2R5A | CAGCAAUACAAGUGCCGAA | NM_006243 |
| 4980 | PPP2R5A | AGGAGAAAUUGAAGAAAUC | NM_006243 |
| 4981 | PPP2R5A | CAGAAAGGGCAUUGUACUU | NM_006243 |
| 4982 | PPP2R5A | CCAUUGUAGCACUGGUAUA | NM_006243 |
| 4983 | PPP2R5A | UGCUGAACUUCUUGAAAUA | NM_006243 |
| 4984 | PPP2R5B | CGACCGAAGUCUAGGUUUU | NM_006244 |
| 4985 | PPP2R5B | CUGAAGAGGAUGAGCCCAA | NM_006244 |
| 4986 | PPP2R5B | GCACAGGCAAGAAGAGAUU | NM_006244 |
| 4987 | PPP2R5B | CCGACAAGGUGGACGGCUU | NM_006244 |
| 4988 | PPP2R5B | CCUCCGUGGCCAAGAGAUA | NM_006244 |
| 4989 | PPP2R5B | CCGCAUGAUCUCAGUGAAU | NM_006244 |
| 4990 | PPP2R5B | UCACAGUAAUCAUGGUCUA | NM_006244 |
| 4991 | PPP2R5B | CCAAGAGAUAUGUGGAUCA | NM_006244 |
| 4992 | PPP2R5B | GCAUGAUCUCAGUGAAUAU | NM_006244 |
| 4993 | PPP2R5B | AGAGAUAUGUGGAUCAAAA | NM_006244 |
| 4994 | PPP2R5B | GGGCAAGCUUGACCAGGAA | NM_006244 |
| 4995 | PPP2R5B | GCUCUGUAUUUCUGGAACA | NM_006244 |
| 4996 | PPP2R5B | UCUAUGAAUUCGAGCACUU | NM_006244 |
| 4997 | PPP2R5B | AAGAAGAGAUUCACAGUGU | NM_006244 |
| 4998 | PPP2R5B | GAACCAAACCAUCGUAUCA | NM_006244 |
| 4999 | PPP2R5B | UGGCUGAGCUGCUGGAGAU | NM_006244 |
| 5000 | PPP2R5B | GAGUAUAUCCUAAGCCUCA | NM_006244 |
| 5001 | PPP2R5B | CCCUGAAGACGGAGCACAA | NM_006244 |
| 5002 | PPP2R5B | GGGAGAUGGAAGAGAUUCU | NM_006244 |
| 5003 | PPP2R5B | ACAAUGUGCUCAAGACCUU | NM_006244 |
| 5004 | PPP2R5B | CAAGAGAUAUGUGGAUCAA | NM_006244 |
| 5005 | PPP2R5B | CAGUGAGAACCCUGAAUUU | NM_006244 |
| 5006 | PPP2R5B | CCAGAGAGAAACACACCUA | NM_006244 |
| 5007 | PPP2R5B | CCUCCCAGUUUGUGAAGAU | NM_006244 |
| 5008 | PPP2R5B | GGUCCAUGGUCUAUUUAUU | NM_006244 |
| 5009 | PPP2R5B | GCAGCUGGUAUAUGAGUUU | NM_006244 |
| 5010 | PPP2R5B | CGUCAGGAGUUAUGGCAAG | NM_006244 |
| 5011 | PPP2R5B | CCAGGAGCGUCAGGAGUUA | NM_006244 |
| 5012 | PPP2R5B | CUCAAGACCUUCAUGGAGA | NM_006244 |
| 5013 | PPP2R5B | AGACGGAGCACAAGCAGUU | NM_006244 |
| 5014 | PPP2R5C | UCACAAAGUCAGAGCGAUA | NM_002719 |
| 5015 | PPP2R5C | UCACAGAAUCUAUGGGAAA | NM_002719 |
| 5016 | PPP2R5C | GGAAAUAUUGGGAAGUAUA | NM_002719 |
| 5017 | PPP2R5C | GCUGAUAGAUUCUCAAAUA | NM_002719 |
| 5018 | PPP2R5C | UGGAAUAGCACAAGGAGAA | NM_002719 |
| 5019 | PPP2R5C | CAUCAGAAUUUGUGAAGAU | NM_002719 |
| 5020 | PPP2R5C | GUGCAGAUGCUGAGAAAGA | NM_002719 |
| 5021 | PPP2R5C | GGAGAGAGAUUUUCUUAAA | NM_002719 |
| 5022 | PPP2R5C | UAGCAGAGUUACUGGAAAU | NM_178587 |
| 5023 | PPP2R5C | GUACUGAGCUUUUGUUUUA | NM_002719 |
| 5024 | PPP2R5C | GACAGAAAUUGGAGUUUUA | NM_002719 |
| 5025 | PPP2R5C | AAGAAGAGCACAAGAUUUU | NM_178588 |
| 5026 | PPP2R5C | GGAAGAAGCAUGGGUUAAA | NM_002719 |
| 5027 | PPP2R5C | GGAGUAAGCCUGUAGAAGA | NM_002719 |
| 5028 | PPP2R5C | CCUAAUAUAGCGAAGAAAU | NM_178587 |
| 5029 | PPP2R5C | UCAAAGACCCAUUGGAACA | NM_002719 |
| 5030 | PPP2RSC | CAUAGGUGGUUCUGUGAUA | NM_002719 |
| 5031 | PPP2R5C | GGAAGAUGAACCAACGUUA | NM_002719 |
| 5032 | PPP2R50 | GUACCAAACUGAUUUCAAA | NM_002719 |
| 5033 | PPP2R5C | CCGCUGAAGUCUAGAUGUU | NM_002719 |
| 5034 | PPP2R5C | GUGUGUACCUAAAGCCAUA | NM_002719 |
| 5035 | PPP2R5C | CAGAGUUACUGGAAAUAUU | NM_002719 |
| 5036 | PPP2R5C | GAUUAGGAGUUCAAACAAU | NM_002719 |
| 5037 | PPP2R5C | CAAUACAUGGCUUGAUAUA | NM_002719 |
| 5038 | PPP2R5C | UUAAGUGUCUUGAGGCAUA | NM_002719 |
| 5039 | PPP2RSC | AGAAAGAUCCGAAGAAGGA | NM_002719 |
| 5040 | PPP2R5C | CAGAAUUUGUGAAGAUCAU | NM_178587 |
| 5041 | PPP2R5C | CAUUGAACCAUCAGAAUUU | NM_002719 |
| 5042 | PPP2R5C | CGAGCUGCUUUAAGUGAAA | NM_002719 |
| 5043 | PPP2R5C | CCUAAAGUUUCCCUAGUUA | NM_002719 |
| 5044 | PPP2R5D | GGACAAUAACUGAUGAAUA | NM_006245 |
| 5045 | PPP2RSD | GGGAACAGCAGGAGAUUAU | NM_006245 |
| 5046 | PPP2R5D | AGAAGUACACACAGGAAUA | NM_006245 |
| 5047 | PPP2R5D | UGAAUGAGCUGGAGGAGAU | NM_006245 |
| 5048 | PPP2R5D | CUGAAGUUGUUUAUGGAAA | NM_180976 |
| 5049 | PPP2R5D | AGGGAAGAGAUGUGGCAAA | NM_006245 |
| 5040 | PPP2R5D | UCAACGAGAUGGUGGAGUA | NM_006245 |
| 5051 | PPP2R5D | CAAACAUAGCCAAGAAGUA | NM_180976 |
| 5052 | PPP2R5D | GCUUAUAUCCGUAGGCAGA | NM_180976 |
| 5053 | PPP2R5D | GUACAGAACUGAAUAAAGU | NM_006245 |
| 5054 | PPP2R5D | GGGAAGAGAUGUGGCAAAA | NM_180976 |
| 5055 | PPP2R5D | GGGCAGGACUCAACGAGAU | NM_180976 |
| 5056 | PPP2R5D | UGGUACAAUUCCUGGAGAA | NM_006245 |
| 5057 | PPP2R5D | AAGAAGAGCACAAGAUGUU | NM_006245 |
| 5058 | PPP2R5D | AGAAGUACAUCGACCAGAA | NM_006245 |
| 5059 | PPP2R5D | AGGUGAUGUUCUUGAAUGA | NM_006245 |
| 5060 | PPP2R5D | CCCUUAAAGAAGAGCACAA | NM_180976 |
| 5061 | PPP2R5D | AAUACAAGGCAGAGAAGCA | NM_180976 |
| 5062 | PPP2R5D | ACGAGAUGGUGGAGUACAU | NM_006245 |
| 5063 | PPP2R5D | GGGCUGAGUUUGACCCAGA | NM_006245 |
| 5064 | PPP2R5D | ACAUCAAGAAGGAGAAAGU | NM_006245 |
| 5065 | PPP2R5D | AGUUUGACCCAGAGGAAGA | NM_006245 |
| 5066 | PPP2R5D | CCGAAUGAAGGAAAGGGAA | NM_180976 |
| 5067 | PPP2R5D | CCAAGGAGGUGAUGUUCUU | NM_006245 |
| 5068 | PPP2R5D | CAGAUAGGGUUGUAUUAUU | NM_006245 |
| 5069 | PPP2RSD | GAGAAGUACACACAGGAAU | NM_006245 |
| 5070 | PPP2R5D | CAACAAGCGUCCCAGCAAU | NM_006245 |
| 5071 | PPP2R5D | CCUAUUUGACAGUGAGGAU | NM_180976 |
| 5072 | PPP2R5D | CGAAUGAAGGAAAGGGAAG | NM_006245 |
| 5073 | PPP2R5D | GAAUGAAGGAAAGGGAAGA | NM_006245 |
| 5074 | PPP2R5E | CGGAAAGGAUUCAGGAUAA | NM_006246 |
| 5075 | PPP2R5E | GGAUGUAGCCUCUGGGAAA | NM_006246 |
| 5076 | PPP2R5E | GGAUAAAGUAGACGGAUUU | NM_006246 |
| 5077 | PPP2R5E | CUGGAUAACUUGACUGUAA | NM_006246 |
| 5078 | PPP2R5E | UCUUAGACGUGAUGGAAUA | NM_006246 |
| 5079 | PPP2R5E | UGGAUAAAGUAGACGGAUU | NM_006246 |
| 5080 | PPP2R5E | CGUGAAGAAUUGUGGAAAA | NM_006246 |
| 5081 | PPP2R5E | GGAAAGGAUUCAGGAUAAA | NM_006246 |
| 5082 | PPP2R5E | AGACAGAAGAGGUCGCAAA | NM_006246 |
| 5083 | PPP2R5E | UUAAUGAACUGGUGGACUA | NM_006246 |
| 5084 | PPP2R5E | GAGAAGAGGUGAUAAACAU | NM_006246 |
| 5085 | PPP2R5E | CCUAAAACAUGUAGUCAAA | NM_006246 |
| 5086 | PPP2R5E | GGAAUGGGGUCAUGAAUUA | NM_006246 |
| 5087 | PPP2R5E | UGGAGGAUCUGGAGUUAAA | NM_006246 |
| 5088 | PPP2R5E | UGAAUUUGAUCCAGAAGAA | NM_006246 |
| 5089 | PPP2R5E | CAGAAGAGGUCGCAAAGUU | NM_006246 |
| 5090 | PPP2R5E | UGGAAGAAAUAUUGGAUGU | NM_006246 |
| 5091 | PPP2R5E | UAGCUGAACUGCUGGAAAU | NM_006246 |
| 5092 | PPP2R5E | UGAAGUAGUUAGAAUGGUA | NM_006246 |
| 5093 | PPP2R5E | AGAAUGGUAUCUUGCAAUA | NM_006246 |
| 5094 | PPP2R5E | GAAGAAAACUCUAACGUCA | NM_006246 |
| 5095 | PPP2R5E | GGGAAGGGAAUAUCGGAUU | NM_006246 |
| 5096 | PPP2R5E | GUUUGGAGUUGUUGCCUUA | NM_006246 |
| 5097 | PPP2R5E | GCAAUGAAUUUGAUCCAGA | NM_006246 |
| 5098 | PPP2R5E | UAUCAAUGGCUUUGCUUUA | NM_006246 |
| 5099 | PPP2R5E | GUGAACAUCUUUCCAGUAA | NM_006246 |
| 5100 | PPP2R5E | UUGAAGGCAUUUAUGGAAA | NM_006246 |
| 5101 | PPP2R5E | AGAAAGAAAAGGAGCGUGA | NM_006246 |
| 5102 | PPP2R5E | GAACAUUGGAAUCCGGCUA | NM_006246 |
| 5103 | PPP2R5E | AGAAAAGGAGCGUGAAGAA | NM_006246 |
| 5104 | PPP3CA | UCUUAUAACUGCAGAGAAA | NM_000944 |
| 5105 | PPP3CA | GGAAAGAGGUGAUAAGGAA | NM_000944 |
| 5106 | PPP3CA | GAACAAGAUCCGAGCAAUA | NM_000944 |
| 5107 | PPP3CA | UAGCAAACCUUGUGAAAUU | NM_000944 |
| 5108 | PPP3CA | GUUCAUACUUCUACAGUUA | NM_000944 |
| 5109 | PPP3CA | GGUCAGAAGAAGAUGGAUU | NM_000944 |
| 5110 | PPP3CA | GGAGAGAGAUAAUAAACUA | NM_000944 |
| 5111 | PPP3CA | GCUUAAUGCCUUUGAAAUU | NM_000944 |
| 5112 | PPP3CA | GAACAAGACACCAUAUUAA | NM_000944 |
| 5113 | PPP3CA | GAGAAAAUAUCCUGACUAA | NM_000944 |
| 5114 | PPP3CA | UGACUGAGAUGCUGGUAAA | NM_000944 |
| 5115 | PPP3CA | GAUCCGAGCAAUAGGCAAA | NM_000944 |
| 5116 | PPP3CA | GGUGAAAGCUGUUCCAUUU | NM_000944 |
| 5117 | PPP3CA | GAGAAGAGAGUGAGAGUGU | NM_000944 |
| 5118 | PPP3CA | GUAUAUCAGUUACGGGUUA | NM_000944 |
| 5119 | PPP3CA | CUAGAGUGAUGAUGUGAAA | NM_000944 |
| 5120 | PPP3CA | CAACAAAAGUCCAUUCAUA | NM_000944 |
| 5121 | PPP3CA | GUGAAUUCUUACAGCACAA | NM_000944 |
| 5122 | PPP3CA | AGUGUUGCAUUGAGAAUAA | NM_000944 |
| 5123 | PPP3CA | GGCAGUAAUAGCAGCAAUA | NM_000944 |
| 5124 | PPP3CA | UGAACUAGGGUCAGAAGAA | NM_000944 |
| 5125 | PPP3CA | GUGAUGAUGUGAAAGAAAU | NM_000944 |
| 5126 | PPP3CA | UGAAUUAGGCAGUCUUAAA | NM_000944 |
| 5127 | PPP3CA | GAGAAUAAUAACAGAGGGU | NM_000944 |
| 5128 | PPP3CA | GUAAUUCACUACAGCCUAA | NM_000944 |
| 5129 | PPP3CA | UAACAAAGCUGCAGUAUUG | NM_000944 |
| 5130 | PPP3CA | CAAAGAACCACCUGCAUAU | NM_000944 |
| 5131 | PPP3CA | GGGCUUAGACCGAAUUAAU | NM_000944 |
| 5132 | PPP3CA | GCAAUUAGCGAUAUAGCAU | NM_000944 |
| 5133 | PPP3CA | CAGAGAAGAGAGUGAGAGU | NM_000944 |
| 5134 | PPP3CB | UGACAGAAAUGUUGGUAAA | NM_021132 |
| 5135 | PPP3CB | GAAAGAAGGUCGAGUAGAU | NM_021132 |
| 5136 | PPP3CB | GCUAUAGAAUGUACAGAAA | NM_021132 |
| 5137 | PPP3CB | UGGUAAAUGUUCUGAGUAU | NM_021132 |
| 5138 | PPP3CB | UCGAGUAGAUGAAGAAAUU | NM_021132 |
| 5139 | PPP3CB | ACUAAUGACUGAAGGUGAA | NM_021132 |
| 5140 | PPP3CB | GGAUAGGAUCAAUGAGAGA | NM_021132 |
| 5141 | PPP3CB | GAUGAAUAUUCGACAGUUU | NM_021132 |
| 5142 | PPP3CB | CCUUUAAGCAGGAAUGUAA | NM_021132 |
| 5143 | PPP3CB | GGUGAAAGAAGGUCGAGUA | NM_021132 |
| 5144 | PPP3CB | UUGAAGAGGCAAAGGGUUU | NM_021132 |
| 5145 | PPP3CB | GUAACAUAGUCUUGGUAUU | NM_021132 |
| 5146 | PPP3CB | CUAUGAAGCUUGUAUGGAA | NM_021132 |
| 5147 | PPP3CB | GAGAAUGCCACCUCGGAAA | NM_021132 |
| 5148 | PPP3CB | CAAUACAGUUCGAGGAUGU | NM_021132 |
| 5149 | PPP3CB | GCAAUUGGCAAGAUGGCAA | NM_021132 |
| 5150 | PPP3CB | CGGAAAGAAAUCAUAAGAA | NM_021132 |
| 5151 | PPP3CB | CGGCCAAGCUGACUGUAAA | NM_021132 |
| 5152 | PPP3CB | CAUCCUUCGGAGAGAGAAA | NM_021132 |
| 5153 | PPP3CB | GUGCAGGACUAUUCGAGUA | NM_021132 |
| 5154 | PPP3CB | CAGAAAUGUUGGUAAAUGU | NM_021132 |
| 5155 | PPP3CB | CCACAUAGAAUCUGCAGUU | NM_021132 |
| 5156 | PPP3CB | GGAAAGAGUCUAUGAAGCU | NM_021132 |
| 5157 | PPP3CB | UUACUGAACUGCUUGGUUA | NM_021132 |
| 5158 | PPP3CB | GAUGUUAGUGGAAGCAUAA | NM_021132 |
| 5159 | PPP3CB | GGAUGAUAUUAGGAGAUUA | NM_021132 |
| 5160 | PPP3CB | UAGUAUAGAGUGUGUCUUA | NM_021132 |
| 5161 | PPP3CB | GCAGACACCUUACUGAAUA | NM_021132 |
| 5162 | PPP3CB | GCUGCAGCCCGGAAAGAAA | NM_021132 |
| 5163 | PPP3CB | CCAGAGAUUUAAGAAGAAA | NM_021132 |
| 5164 | PPP3CC | GGAAGUAGCCUUAAAGAUA | NM_005605 |
| 5165 | PPP3CC | UCACAGAGAUGCUGGUAAA | NM_005605 |
| 5166 | PPP3CC | GCUCUUAUUUCUACAGUUA | NM_005605 |
| 5167 | PPP3CC | GAAUAAGAUCAGAGCCAUU | NM_005605 |
| 5168 | PPP3CC | CAAGGAAGUAUUUGAGAAU | NM_005605 |
| 5169 | PPP3CC | AGGAAUAAGAUCAGAGCCA | NM_005605 |
| 5170 | PPP3CC | GGAAGAGGAAGUAGCCUUA | NM_005605 |
| 5171 | PPP3CC | AAGGAGAUCAUCAGGAAUA | NM_005605 |
| 5172 | PPP3CC | GAUCCGGAGUUUUGAAGAA | NM_005605 |
| 5173 | PPP3CC | GAAGUAGCCUUAAAGAUAA | NM_005605 |
| 5174 | PPP3CC | GGACCGAAUUAAUGAGCGA | NM_005605 |
| 5175 | PPP3CC | GAUCAGAGCCAUUGGGAAG | NM_005605 |
| 5176 | PPP3CC | GUAAGGAGAUCAUCAGGAA | NM_005605 |
| 5177 | PPP3CC | AUUUGAAGUUGGAGGAUCA | NM_005605 |
| 5178 | PPP3CC | CAAUAAAGCUGCUGUGUUG | NM_005605 |
| 5179 | PPP3CC | UGUGAAGUCUUGUGCUAUA | NM_005605 |
| 5180 | PPP3CC | UAUCGAAUGUACAGGAAGA | NM_005605 |
| 5181 | PPP3CC | GUAUAGAGUGUGUGCUGUA | NM_005605 |
| 5182 | PPP3CC | AGGAAAUUAGACAGGUUUA | NM_005605 |
| 5183 | PPP3CC | CGAGACAGCCACAGUAGAA | NM_005605 |
| 5184 | PPP3CC | GAAGAAAGCCCAUUCAUGA | NM_005605 |
| 5185 | PPP3CC | GGAGGAAUGUCACCUGAAA | NM_005605 |
| 5186 | PPP3CC | UGGUGAUAUUCAUGGACAA | NM_005605 |
| 5187 | PPP3CC | ACAGGAAUGUCGAAUCAAA | NM_005605 |
| 5188 | PPP3CC | AGGAAUGUCACCUGAAAUU | NM_005605 |
| 5189 | PPP300 | AGUAUUUGAGAAUGGGAAA | NM_005605 |
| 5190 | PPP3CC | AAACAGGAAUGUCGAAUCA | NM_005605 |
| 5191 | PPP3CC | CCACAGUAGAAGCGGUAGA | NM_005605 |
| 5192 | PPP3CC | GGCAAGAAAGUGAGAGUGU | NM_005605 |
| 5193 | PPP3CC | GGGCCAAUGAAAUCUGUAA | NM_005605 |
| 5194 | PPP3R1 | GGAUGGAGAUGGAAGAAUA | NM_000945 |
| 5195 | PPP3R1 | GAGAUAAGGAGCAGAAAUU | NM_000945 |
| 5196 | PPP3R1 | GGAUAAAGAUGGCUAUAUU | NM_000945 |
| 5197 | PPP3R1 | UCUGAAAGAUACACAGUUA | NM_000945 |
| 5198 | PPP3R1 | GAACUAGCCUUUUGUGAAU | NM_000945 |
| 5199 | PPP3R1 | GCAAGUUAUCCUUUGGAAA | NM_000945 |
| 5200 | PPP3R1 | GAGCAAAAUUGUAUCCAAA | NM_000945 |
| 5201 | PPP3R1 | AGAUAAGGAUGGAGAUGGA | NM_000945 |
| 5202 | PPP3R1 | AGAUGGGAAUGGAGAAGUA | NM_000945 |
| 5203 | PPP3R1 | GGAGAUAAGGAGCAGAAAU | NM_000945 |
| 5204 | PPP3R1 | AGGCUAGGAAAGAGAUUUA | NM_000945 |
| 5205 | PPP3R1 | GAGCAGAAAUUGAGGUUUG | NM_000945 |
| 5206 | PPP3R1 | GUAACAAAGGAGUCUGUAA | NM_000945 |
| 5207 | PPP3R1 | GGAUGAAAUUAAAAGGCUA | NM_000945 |
| 5208 | PPP3R1 | GUGCCAAGCAGAACAUAAA | NM_000945 |
| 5209 | PPP3R1 | GAUAGAAGACUGUACAAUU | NM_000945 |
| 5210 | PPP3R1 | GAGAAAUCUUGCUAAUCUA | NM_000945 |
| 5211 | PPP3R1 | GAUAAGGAGCAGAAAUUGA | NM_000945 |
| 5212 | PPP3R1 | CAAGUUAUCCUUUGGAAAU | NM_000945 |
| 5213 | PPP3R1 | AUACACAGUUACAGCAAAU | NM_000945 |
| 5214 | PPP3R1 | GGAAAGAGAUUUAAGAAGC | NM_000945 |
| 5215 | PPP3R1 | ACAGCGAGUAAUAGAUAUA | NM_000945 |
| 5216 | PPP3R1 | CCAAGUAAGUGUUAUUGAA | NM_000945 |
| 5217 | PPP3R1 | UCAGUAACGUUAAGUGCUA | NM_000945 |
| 5218 | PPP3R1 | UGAAGAUGAUGGUGGGGAA | NM_000945 |
| 5219 | PPP3R1 | GAAGAAUAUCCUUUGAAGA | NM_000945 |
| 5220 | PPP3R1 | AAGAAUACCUGAAGUGAUC | NM_000945 |
| 5221 | PPP3R1 | GGGAAAUGAGGCAAGUUAU | NM_000945 |
| 5222 | PPP3R1 | GAAGAAUACCUGAAGUGAU | NM_000945 |
| 5223 | PPP3R1 | GUACAGCGAGUAAUAGAUA | NM_000945 |
| 5224 | PPP4CC | CCAGAGAGAUCUUGGUAGA | NM_002720 |
| 5225 | PPP4CG | GGAGAGGCCUGGAGACCUA | NM_002720 |
| 5226 | PPP4CG | GCACUGAGAUCUUUGACUA | NM_002720 |
| 5227 | PPP4CG | GGACGAGCAUCUCCAGAAA | NM_002720 |
| 5228 | PPP4CU | UCAAAGAGCUGUUCAGAGU | NM_002720 |
| 5229 | PPP4CC | CCAUGAAGUUUCCAAUAAU | NM_002720 |
| 5230 | PPP4CU | UCUUGGUAGAGGAGAGCAA | NM_002720 |
| 5231 | PPP4CG | GCGACGUCCCUGAGACCAA | NM_002720 |
| 5232 | PPP4CA | ACGAGCAUCUCCAGAAAGA | NM_002720 |
| 5233 | PPP4CG | GACAAUCGACCGAAAGCAA | NM_002720 |
| 5234 | PPP4CC | CGCUAAGGCCAGAGAGAUC | NM_002720 |
| 5235 | PPP4CC | CGGCGACAUCCAUGGACAA | NM_002720 |
| 5236 | PPP4C | ACCAUGAAGUUUCCAAUAA | NM_002720 |
| 5237 | PPP4C | UCAAGGAGAGCGAAGUCAA | NM_002720 |
| 5238 | PPP4C | CUGCUACCGCUGUGGGAAU | NM_002720 |
| 5239 | PPP4C | GUCAAGGCCCUGUGCGCUA | NM_002720 |
| 5240 | PPP4C | ACGAUGAGUGCCUGCGCAA | NM_002720 |
| 5241 | PPP4C | CAAUCGACCGAAAGCAAGA | NM_002720 |
| 5242 | PPP4C | CGACAUCCAUGGACAAUUC | NM_002720 |
| 5243 | PPP4C | CCAUGAGAGUCGCCAGAUC | NM_002720 |
| 5244 | PPP4C | GAUGAGUGCCUGCGCAAGU | NM_002720 |
| 5245 | PPP4C | GCUGCGAGCUCAUCAAGGA | NM_002720 |
| 5246 | PPP4C | CAUGAGAGUCGCCAGAUCA | NM_002720 |
| 5247 | PPP4C | GCGCUAAGGCCAGAGAGAU | NM_002720 |
| 5248 | PPP4C | UCUAUAGCGUCGAAACGUU | NM_002720 |
| 5249 | PPP4C | GAACCAUGAAGUUUCCAAU | NM_002720 |
| 5250 | PPP4C | AACCAUGAAGUUUCCAAUA | NM_002720 |
| 5251 | PPP4C | UCUAUGGCUUCUACGAUGA | NM_002720 |
| 5252 | PPP4C | CAAAGAGCUGUUCAGAGUA | NM_002720 |
| 5253 | PPP4C | GGCCAGAGAGAUCUUGGUA | NM_002720 |
| 5254 | PPP5C | AGAAGUACAUCAAGGGUUA | NM_006247 |
| 5255 | PPP5C | GGUACAAGGACCAGAAGAA | NM_006247 |
| 5256 | PPP5C | UGAAAUACCAGGAGUGCAA | NM_006247 |
| 5257 | PPP5C | GCAACAAGAUCGUGAAGCA | NM_006247 |
| 5258 | PPP5C | CCAUUGAGCUGGACAAGAA | NM_006247 |
| 5259 | PPP5C | AAGUCAAGGCCGAGGGCUA | NM_006247 |
| 5260 | PPP5C | UCAAAGAGACAGAGAAGAU | NM_006247 |
| 5261 | PPP5C | GCAACAUGGCACUGGGCAA | NM_006247 |
| 5262 | PPP5C | GAGCAUGACCAUUGAGGAU | NM_006247 |
| 5263 | PPP5C | AGAAGAAACUGCACCGGAA | NM_006247 |
| 5264 | PPP5C | ACUUCAAAGCCAAGGACUA | NM_006247 |
| 5265 | PPP5C | CAGAGGAGCUCAAGACUCA | NM_006247 |
| 5266 | PPP5C | ACAGAGAAGAUUACAGUAU | NM_006247 |
| 5267 | PPP5C | AGAACAACCUGGACUAUAU | NM_006247 |
| 5268 | PPP5C | AGACGGUGGUCAAGGUGAA | NM_006247 |
| 5269 | PPP5C | AGGGUGAGGUGAAGGCCAA | NM_006247 |
| 5270 | PPP5C | GCAAAGUGACAAUCAGUUU | NM_006247 |
| 5271 | PPP5C | AAAGAGACAGAGAAGAUUA | NM_006247 |
| 5272 | PPP5C | GAAGAAACUGCACCGGAAA | NM_006247 |
| 5273 | PPP5C | GCAUGACCAUUGAGGAUGA | NM_006247 |
| 5274 | PPP5C | ACAAGAUCGUGAAGCAGAA | NM_006247 |
| 5275 | PPP5C | GUACAAGGACCAGAAGAAA | NM_006247 |
| 5276 | PPP5C | UCAACAUAUUCGAGCUCAA | NM_006247 |
| 5277 | PPP5C | GGGCGUGAGCUGUCAGUUU | NM_006247 |
| 5278 | PPP5C | CCAUCAAGUUCUACAGCCA | NM_006247 |
| 5279 | PPP5C | GGUCAGAUCCACAGCCACA | NM_006247 |
| 5280 | PPP5C | AAGAGAACAACCUGGACUA | NM_006247 |
| 5281 | PPP5C | GAGGCAACCACGAGACAGA | NM_006247 |
| 5282 | PPP5C | ACUACGAGACGGUGGUCAA | NM_006247 |
| 5283 | PPP5C | ACGUCAAGCCCAUGGCCUA | NM_006247 |
| 5284 | PPP5C | GGACAAGUAUGUGGAAAUA | NM_002721 |
| 5285 | PPP5C | GAGCAAAGGUCACAAAUGA | NM_002721 |
| 5286 | PPP5C | UCAUGAGAGUAGACAGAUA | NM_002721 |
| 5287 | PPP6C | GCAUGUAGCUCUUGCUUAU | NM_002721 |
| 5288 | PPP6C | UGGACAAGUAUGUGGAAAU | NM_002721 |
| 5289 | PPP6C | GCACGAAGGCUAUAAAUUU | NM_002721 |
| 5290 | PPP6C | GCGAGGAAAUCAUGAGAGU | NM_002721 |
| 5291 | PPP6C | UAACACAGGUCUAUGGAUU | NM_002721 |
| 5292 | PPP6C | CUGCUAUCGUUGUGGAAAU | NM_002721 |
| 5293 | PPP6C | GCUAAUGCCUGGAGAUACU | NM_002721 |
| 5294 | PPP6C | UCAAAUAUGGAAAUGCUAA | NM_002721 |
| 5295 | PPP6C | CAAGAGAACCAAAGUUAUU | NM_002721 |
| 5296 | PPP6C | UGAGAAGACUUGAGAAAUG | NM_002721 |
| 5297 | PPP6C | CUAAAUGGCCUGAUCGUAU | NM_002721 |
| 5298 | PPP6C | GCAAGUACCUGCCAGAGAA | NM_002721 |
| 5299 | PPP6C | GCUCACAGUAGCAGCUUUA | NM_002721 |
| 5300 | PPP6C | GUAACAGUGUGUGGAGAUA | NM_002721 |
| 5301 | PPP6C | CGCUAGACCUGGACAAGUA | NM_002721 |
| 5302 | PPP6C | CUGCAGAGCACAUCAACUA | NM_002721 |
| 5303 | PPP6C | GGAAAUAUUGCUUCGAUCA | NM_002721 |
| 5304 | PPP6C | CACGAAGGCUAUAAAUUUA | NM_002721 |
| 5305 | PPP6C | GAGGAAAUCAUGAGAGUAG | NM_002721 |
| 5306 | PPP6C | GCAGCAAAGUUGUUAUUCA | NM_002721 |
| 5307 | PPP6C | AAUCAUGAGAGUAGACAGA | NM_002721 |
| 5308 | PPP6C | AUGAGAAGCUGGUGACAGU | NM_002721 |
| 5309 | PPP6C | CAUGAGAGUAGACAGAUAA | NM_002721 |
| 5310 | PPP6C | UACAAGAGAACCAAAGUUA | NM_002721 |
| 5311 | PPP6C | AAAUUGGUCUAAAGGACAA | NM_002721 |
| 5312 | PPP6C | GUUUAAUAGAUGAGCAGAU | NM_002721 |
| 5313 | PPP6C | AGAUAUCCAUGGACAGUUU | NM_002721 |
| 5314 | PR48 | GCAGAAAAGUGCAGAAGGA | NM_013239 |
| 5315 | PR48 | CCAAGAUGAUAGACAGGAU | NM_013239 |
| 5316 | PR48 | CCGUGGACCUGUACGAGUA | NM_013239 |
| 5317 | PR48 | CAGAAGGAAGGGAAGAUCA | NM_013239 |
| 5318 | PR48 | AGGAAGGGAAGAUCAGCUA | NM_013239 |
| 5319 | PR48 | GCGUUUGUACGGAAUGAUA | NM_013239 |
| 5320 | PR48 | AGAAGUACCUCGACCACGA | NM_013239 |
| 5321 | PR48 | CGGCCGAGGAGUACGACAU | NM_013239 |
| 5322 | PR48 | GUUCAGACACGGAAAGAAG | NM_013239 |
| 5323 | PR48 | GUGCAGAAGGAAGGGAAGA | NM_013239 |
| 5324 | PR48 | CGGCCAAGUUCGUCCAUCU | NM_013239 |
| 5325 | PR48 | GAUCUCUGAGGAAGACAAA | NM_013239 |
| 5326 | PR48 | GCUCCUUCCUGCAGAAUGU | NM_013239 |
| 5327 | PR48 | GUACGGAAUGAUAAACUUU | NM_013239 |
| 5328 | PR48 | UGGACGAGCUGUUCCUGUA | NM_013239 |
| 5329 | PR48 | GACGAGAGUAGUUCAGACA | NM_013239 |
| 5330 | PR48 | GAGCAGAAAGAGCAGAUCU | NM_013239 |
| 5331 | PR48 | GGACUGAAGGGAAGAUCAC | NM_013239 |
| 5332 | PR48 | GGGCCACCAUGGAUGACAU | NM_013239 |
| 5333 | PR48 | UGACCGAAUUCUUCUCGUA | NM_013239 |
| 5334 | PR48 | CAGCCGGUCCUGAAGAUGA | NM_013239 |
| 5335 | PR48 | GGAGCUCCUUCCUGCAGAA | NM_013239 |
| 5336 | PR48 | UCAACCAGCUGACCGAAUU | NM_013239 |
| 5337 | PR48 | GAUCAGCUAUGCCGACUUU | NM_013239 |
| 5338 | PR48 | GCCAAAGCAUUCCGACCUU | NM_013239 |
| 5339 | PR48 | CGACCAGCAUCGAGUACUG | NM_013239 |
| 5340 | PR48 | UGAAGGAGGCGUCCGAGUU | NM_013239 |
| 5341 | PR48 | GCUGCAAGCUGGCCAACGU | NM_013239 |
| 5342 | PR48 | GGAAGGGAAGAUCAGCUAU | NM_013239 |
| 5343 | PR48 | UGUACGGAAUGAUAAACUU | NM_013239 |
| 5344 | PRG1 | GGGAAGGAGAACAUGGUUA | NM_014839 |
| 5345 | PRG1 | GAAGCAACAUUGAUAGCAA | NM_014839 |
| 5346 | PRG1 | GGAAUAAUCUGCGGGCUAA | NM_014839 |
| 5347 | PRG1 | GGACUAGAGCCCAACAUUA | NM_014839 |
| 5348 | PRG1 | GAAUGAAAGUCGAAAGUUG | NM_014839 |
| 5349 | PRG1 | CCACCCAGAUCCAUAGAAA | NM_014839 |
| 5350 | PRG1 | GGAUCUGACCUCACAGUUA | NM_014839 |
| 5351 | PRG1 | GACUAGAGCCCAACAUUAA | NM_014839 |
| 5352 | PRG1 | AAGAGAAGCAACAUUGAUA | NM_014839 |
| 5353 | PRG1 | UGACAGACCUCAAUCAAGA | NM_014839 |
| 5354 | PRG1 | UGGAAUUGCUCAUACAGAA | NM_014839 |
| 5355 | PRG1 | AUGGUUACCUUCAGCAAUA | NM_014839 |
| 5356 | PRG1 | UAGCAGCAGUGAUGGAAUU | NM_014839 |
| 5357 | PRG1 | GGAGAAAGGGCAAUAUCAU | NM_014839 |
| 5358 | PRG1 | GUUAAAAGCUGCUGAAAAG | NM_014839 |
| 5359 | PRG1 | GGAUAACUCAGUAUAAGAA | NM_014839 |
| 5360 | PSPH | GGCAACAAGUCAAGGAUAA | NM_004577 |
| 5361 | PSPH | UGGGAGAACUGGAAGAAUA | NM_004577 |
| 5362 | PSPH | CCUAAUAUCUGGUGGCUUU | NM_004577 |
| 5363 | PSPH | GGGAGAACUGGAAGAAUAA | NM_004577 |
| 5364 | PSPH | CCAAUGUCCUAGAGAGUUU | NM_004577 |
| 5365 | PSPH | UUGUAGAGCUGCUGGGAGA | NM_004577 |
| 5366 | PSPH | AGAAGGAAUCGAUGAGCUA | NM_004577 |
| 5367 | PSPH | GGAGAUGGUGCCACAGAUA | NM_004577 |
| 5368 | PSPH | CGGUGAAUAUGCAGGUUUU | NM_004577 |
| 5369 | PSPH | GGAUAACGCCAAAUGGUAU | NM_004577 |
| 5370 | PSPH | AGUCAAGGAUAACGCCAAA | NM_004577 |
| 5371 | PSPH | UGGAAAAGGAAAAGUGAUU | NM_004577 |
| 5372 | PSPH | CUACUUUAACGGUGAAUAU | NM_004577 |
| 5373 | PSPH | GAGAAGAAGGAAUCGAUGA | NM_004577 |
| 5374 | PSPH | GAUUGAUACUGUUUGCUUA | NM_004577 |
| 5375 | PSPH | GGGAGCAGGUGCAGAGACU | NM_004577 |
| 5376 | PSPH | CCUAUUACAACUUGCUAUA | NM_004577 |
| 5377 | PSPH | CAACCAAUGUAUUUGCCAA | NM_004577 |
| 5378 | PSPH | CAUCAGAGAAGAAGGAAUC | NM_004577 |
| 5379 | PSPH | CCAAUAGGCUGAAAUUCUA | NM_004577 |
| 5380 | PSPH | GAGCAGGUGCAGAGACUCA | NM_004577 |
| 5381 | PSPH | GAUUGGAGAUGGUGCCACA | NM_004577 |
| 5382 | PSPH | GGCAUAAGGGAGCUGGUAA | NM_004577 |
| 5383 | PSPH | GGCUGAAAUUCUACUUUAA | NM_004577 |
| 5384 | PSPH | AGGCAACAAGUCAAGGAUA | NM_004577 |
| 5385 | PSPH | GAUAACGCCAAAUGGUAUA | NM_004577 |
| 5386 | PSPH | AGCUGAAUCUGGUGGAAAA | NM_004577 |
| 5387 | PSPH | GAGGAAAUGUGAUCAGGCA | NM_004577 |
| 5388 | PSPH | UCUGGUGGCUUUAGGAGUA | NM_004577 |
| 5389 | PSPH | UAGGAGUAUUGUAGAGCAU | NM_004577 |
| 5390 | PTEN | AGCUAAAGGUGAAGAUAUA | NM_000314 |
| 5391 | PTEN | CAGAUAAUGACAAGGAAUA | NM_000314 |
| 5392 | PTEN | AGUAAGGACCAGAGACAAA | NM_000314 |
| 5393 | PTEN | GGAUAAAACACCAUGAAAA | NM_000314 |
| 5394 | PTEN | GAAUGAACCUUUUGAUGAA | NM_000314 |
| 5395 | PTEN | AAACAGAACAAGAUGCUAA | NM_000314 |
| 5396 | PTEN | AGAAAGACUUGAAGGCGUA | NM_000314 |
| 5397 | PTEN | CUGUAAAGCUGGAAAGGGA | NM_000314 |
| 5398 | PTEN | GAAGUAAGGACCAGAGACA | NM_000314 |
| 5399 | PTEN | CCACAAAUGAAGGGAUAUA | NM_000314 |
| 5400 | PTEN | GUAUAGAGCGUGCAGAUAA | NM_000314 |
| 5401 | PTEN | GCAUAUUGGUGCUAGAAAA | NM_000314 |
| 5402 | PTEN | CAACAAUGACUUAACCAUA | NM_000314 |
| 5403 | PTEN | GAAUGAACCUUCUGCAACA | NM_000314 |
| 5404 | PTEN | GCAGAUAAUGACAAGGAAU | NM_000314 |
| 5405 | PTEN | CAAAUAAAGACAAAGCCAA | NM_000314 |
| 5406 | PTEN | CAGCUAAAGGUGAAGAUAU | NM_000314 |
| 5407 | PTEN | GAUCGUUAGCAGAAACAAA | NM_000314 |
| 5408 | PTEN | CGAUAGCAUUUGCAGUAUA | NM_000314 |
| 5409 | PTEN | AAGACAAAGCCAACCGAUA | NM_000314 |
| 5410 | PTEN | ACGAACUGGUGUAAUGAUA | NM_000314 |
| 5411 | PTEN | GAUCUUGACCAAUGGCUAA | NM_000314 |
| 5412 | PTEN | GGAACAAUAUUGAUGAUGU | NM_000314 |
| 5413 | PTEN | UGAAGUGGCUAAAGAGCUU | NM_000314 |
| 5414 | PTEN | CAACUGAAGUGGCUAAAGA | NM_000314 |
| 5415 | PTEN | CAGAAAGACUUGAAGGCGU | NM_000314 |
| 5416 | PTEN | GCAAAUAAAGACAAAGCCA | NM_000314 |
| 5417 | PTEN | GCUAAGUGAAGAUGACAAU | NM_000314 |
| 5418 | PTEN | CAGUAGAGGAGCCGUCAAA | NM_000314 |
| 5419 | PTEN | AAGUAGAGUUCUUCCACAA | NM_000314 |
| 5420 | PTP4A1 | GUGCAAACAUGUAGAAUAU | NM_003463 |
| 5421 | PTP4A1 | CUUAAGAAGUAUGGAGUUA | NM_003463 |
| 5422 | PTP4A1 | AAUUGAAGGUGGAAUGAAA | NM_003463 |
| 5423 | PTP4A1 | CUGGUUAAGUCUUGUGAAA | NM_003463 |
| 5424 | PTP4A1 | GCUAAUGAAUUGAGCACAU | NM_003463 |
| 5425 | PTP4A1 | GGUUAAGUCUUGUGAAAAU | NM_003463 |
| 5426 | PTP4A1 | CAGAAGUGUUGAAUUGAAA | NM_003463 |
| 5427 | PTP4A1 | AAAGGGAAGUGGAAGUAUA | NM_003463 |
| 5428 | PTP4A1 | CAUACAAGAACAUGAGAUU | NM_003463 |
| 5429 | PTP4A1 | AUACGAAGAUGCAGUACAA | NM_003463 |
| 5430 | PTP4A1 | GGAGAAGUAUCGUCCUAAA | NM_003463 |
| 5431 | PTP4A1 | CCACAAUCUUCAAUGAGUA | NM_003463 |
| 5432 | PTP4A1 | AGGUAGAGAUGCUUUGUUA | NM_003463 |
| 5433 | PrP4A1 | CAAGUGAACUGUAGAAACU | NM_003463 |
| 5434 | PTP4A1 | CCUCACACCUGAAUUGAAA | NM_003463 |
| 5435 | PTP4A1 | GCAAGCAACUUCUGUAUUU | NM_003463 |
| 5436 | PTP4A1 | GGACAGCCUUGGUUUGUAA | NM_003463 |
| 5437 | PTP4A1 | AGUAAGAGUAUGUGAAGCA | NM_003463 |
| 5438 | PTP4A1 | GAAUUGAGCACAUCUAAUA | NM_003463 |
| 5439 | PTP4A1 | GGACUCAAAGUUUAAGUAA | NM_003463 |
| 5440 | PTP4A1 | UGUAAAGGACUCAAAGUUU | NM_003463 |
| 5441 | PTP4A1 | CCACAUUCAUACCAAUAUA | NM_003463 |
| 5442 | PTP4A1 | GAGCUGAAACAUCUAAAUA | NM_003463 |
| 5443 | PTP4A1 | GGGACCGGCUGUAUGAUUA | NM_003463 |
| 5444 | PTP4A1 | CAAAAUACCCAGCACAAUA | NM_003463 |
| 5445 | PTP4A1 | UAACACAGCUCUAUACCUA | NM_003463 |
| 5446 | PTP4A1 | CAGUACAAUUCAUAAGACA | NM_003463 |
| 5447 | PTP4A1 | ACUCUGAGGUGCAACUUAA | NM_003463 |
| 5448 | PTP4A1 | CAACUUGGCUAAAGAAUCU | NM_003463 |
| 5449 | PTP4A1 | ACACUACUCUUGUGGAGAA | NM_003463 |
| 5450 | PTP4A2 | CGAUUACGCUUCAGAGAUA | NM_080391 |
| 5451 | PTP4A2 | GUAAACAAGUGGAAAGUGA | NM_003479 |
| 5452 | PTP4A2 | UGAUAAAGCUCCAGUUGAA | NM_003479 |
| 5453 | PTP4A2 | GAUAGUAGAUGAUUGGUUA | NM_003479 |
| 5454 | PTP4A2 | AAAUAGGUCUCUAAGGAAA | NM_003479 |
| 5455 | PTP4A2 | GAACAUGCGUUUUCUGAUA | NM_003479 |
| 5456 | PTP4A2 | GAGACUGGCCUCAGAAAUA | NM_080391 |
| 5457 | PTP4A2 | AGAGAAUGCUGGUAGCUUA | NM_003479 |
| 5458 | PTP4A2 | GAAAUGUGAAUCUGGAAUA | NM_080391 |
| 5459 | PTP4A2 | CCAAGUUGUAGAUGGAAUA | NM_080391 |
| 5460 | PTP4A2 | AGAAGGAUGUAUAAAGCAA | NM_003479 |
| 5461 | PTP4A2 | CAACAAGUUCACAGAGGAA | NM_080391 |
| 5462 | PTP4A2 | GAGAAAUGCUUGUGGUAUG | NM_003479 |
| 5463 | PTP4A2 | CAAAGGAGCAGCAGCAAAU | NM_003479 |
| 5464 | PTP4A2 | GAAUAUACGUUGCACAUUU | NM_003479 |
| 5465 | PTP4A2 | GAGAAAACACUGAUUGAUA | NM_003479 |
| 5466 | PTP4A2 | GAACAUUAGGCCUGUGCAA | NM_003479 |
| 5467 | PTP4A2 | AGAAGGAAAUGUAAACGAA | NM_080391 |
| 5468 | PTP4A2 | CUUAAGAAGUAUGGAGUGA | NM_080391 |
| 5469 | PTP4A2 | AAUGAUGCCUAGUGAGUAU | NM_003479 |
| 5470 | PTP4A2 | GAAGAGAGACAUCGUGCAA | NM_003479 |
| 5471 | PTP4A2 | GGAUUCAAGUGGAUUCUAA | NM_003479 |
| 5472 | PTP4A2 | GAGAAUGCUGGUAGCUUAA | NM_003479 |
| 5473 | PTP4A2 | GAGAGAAGCUUCAUAAGGA | NM_080391 |
| 5474 | PTP4A2 | AGUUGUAGAUGGAAUAGAA | NM_080391 |
| 5475 | PTP4A2 | CAAUGAAGCUAAGUGGUUA | NM_003479 |
| 5476 | PTP4A2 | AGAGAAGCUUCAUAAGGAA | NM_080391 |
| 5477 | PTP4A2 | CCAAACAGCUGCUUUAUUU | NM_003479 |
| 5478 | PTP4A2 | CAACAAUGAUGCCUAGUGA | NM_003479 |
| 5479 | PTP4A2 | CCAAUGAAGCUAAGUGGUU | NM_003479 |
| 5480 | PTP4A3 | UCACCUACCUGGAGAAAUA | NM_007079 |
| 5481 | PTP4A3 | CCGGCAAGGUAGUGGAAGA | NM_032611 |
| 5482 | PTP4A3 | UGAAGUGACCUAUGAOAAA | NM_007079 |
| 5483 | PTP4A3 | GUGAAGUGACCUAUGACAA | NM_007079 |
| 5484 | PTP4A3 | AAACAGAGGCUGCGGUUCA | NM_007079 |
| 5485 | PTP4A3 | UUGAGGACCUGAAGAAGUA | NM_007079 |
| 5486 | PTP4A3 | GCUACAAACACAUGCGCUU | NM_007079 |
| 5487 | PTP4A3 | UCAUUGAGGACCUGAAGAA | NM_007079 |
| 5488 | PTP4A3 | GAGGUGAGCUACAAACACA | NM_007079 |
| 5489 | PTP4A3 | UCUCGUUUCUCUUGGACAA | NM_007079 |
| 5490 | PTP4A3 | CUGAAGAAGUACGGGGCUA | NM_032611 |
| 5491 | PTP4A3 | GCGGAGCCAUCAACAGCAA | NM_032611 |
| 5492 | PTP4A3 | ACAAAACGCCGCUGGAGAA | NM_007079 |
| 5493 | PTP4A3 | UAAAACAGGAGCCGUGAAA | NM_032611 |
| 5494 | PTP4A3 | GAGACGGGAGUUUGGAGUU | NM_032611 |
| 5495 | PTP4A3 | GGACUGGCCGUUUGACGAU | NM_007079 |
| 5496 | PTP4A3 | ACAGCAAGCAGCUCACCUA | NM_007079 |
| 5497 | PTP4A3 | AAGACCCGGUGCUGCGUUA | NM_032611 |
| 5498 | PTP4A3 | GCUCACCUACCUGGAGAAA | NM_007079 |
| 5499 | PTP4A3 | AAACGCCGCUGGAGAAGGA | NM_007079 |
| 5500 | PTP4A3 | AGAGCGGGAUGAAGUACGA | NM_032611 |
| 5501 | PTP4A3 | GAAGUGACCUAUGACAAAA | NM_032611 |
| 5502 | PTP4A3 | GGACACCCGAAGGCAAUAA | NM_007079 |
| 5503 | PTP4A3 | GUUUGGAGUUGCCCGCUUU | NM_032611 |
| 5504 | PTP4A3 | GCACAGGGAUCUCGUUCUC | NM_007079 |
| 5505 | PTP4A3 | CCUCUAGCCUGUUUGUUGU | NM_007079 |
| 5506 | PTP4A3 | GUUCUCGGCACCUUAAAUU | NM_007079 |
| 5507 | PTP4A3 | UUAUGUAGCUCAGGACCUU | NM_007079 |
| 5508 | PTP4A3 | GUGCGUGUGUGUGAAGUGA | NM_032611 |
| 5509 | PTP4A3 | AGACGGGAGUUUGGAGUUG | NM_007079 |
| 5510 | PTP9Q22 | GGAAGAAACAAUUGCAUUA | NM_152422 |
| 5511 | PTP9Q22 | ACUCAAAGAUAAUGGGUCA | NM_177995 |
| 5512 | PTP9Q22 | GGCCAAAGCCCUAGCAAAU | NM_152422 |
| 5513 | PTP9Q22 | GAGAAUGACUGCUGACCAA | NM_152422 |
| 5514 | PTP9Q22 | CCACAGAUGAACUAAGAAA | NM_152422 |
| 5515 | PTP9Q22 | UGGAAGGACUCAAAGAUAA | NM_177995 |
| 5516 | PTP9Q22 | CGGUAGAGCUUGCAAGUAU | NM_152422 |
| 5517 | PTP9Q22 | CGAGAUGGAGCUUGGGAAA | NM_152422 |
| 5518 | PTP9Q22 | GCAGCUGGAUAAAGAGUUA | NM_152422 |
| 5519 | PTP9Q22 | CUACAGUGACUCAGAUUUA | NM_152422 |
| 5520 | PTP9Q22 | GAUAAUAGUUCUUCCCAAU | NM_152422 |
| 5521 | PTP9Q22 | GGAAAUUAAUCAGGCUAUA | NM_152422 |
| 5522 | PTP9Q22 | CUAAAGAUCCAGAUAGUAU | NM_152422 |
| 5523 | PTP9Q22 | GUGAAUAAGUUGAAGAUUG | NM_152422 |
| 5524 | PTP9Q22 | CUAAAGAAGUUACUGCUUA | NM_152422 |
| 5525 | PTP9Q22 | GGAAGGACUCAAAGAUAAU | NM_152422 |
| 5526 | PTP9Q22 | CCAUUAAGGCAUUCACUAA | NM_152422 |
| 5527 | PtP9Q22 | GAAGAAGGCUAUUGCUACA | NM_152422 |
| 5528 | PTP9Q22 | CGGCCAAAGCCCUAGCAAA | NM_152422 |
| 5529 | PTP9Q22 | CUGGAAGGACUCAAAGAUA | NM_152422 |
| 5530 | PTP9Q22 | UGGUGAAGGUGAUGACAUU | NM_152422 |
| 5531 | PTP9Q22 | GAACUAAGAAAGUCACCAA | NM_152422 |
| 5532 | PTP9Q22 | GGUGAUGACAUUUGCCUUA | NM_152422 |
| 5533 | PTP9Q22 | AGGCAUUCACUAAGGUUAA | NM_152422 |
| 5534 | PTP9Q22 | GGGAAGAAACAAUUGCAUU | NM_152422 |
| 5535 | PTP9Q22 | AUAAAGAGUUACUGAGGCA | NM_177995 |
| 5536 | PTP9Q22 | GAUAAUGGGUCACCAAUUU | NM_152422 |
| 5537 | PTP9Q22 | GGAUUAUGGUGUAGCGUCU | NM_152422 |
| 5538 | PTP9Q22 | GCUUAAAGACGGAAUUUCA | NM_152422 |
| 5539 | PTP9Q22 | CAAGACUCAUUUAGAACAA | NM_152422 |
| 5540 | PTPLA | AGGAACACACAGAGGUUUA | NM_014241 |
| 5541 | PTPLA | AUUAAAUGGGCCAGAUAUA | NM_014241 |
| 5542 | PTPLA | CAAUAAGACUUCCUAACAA | NM_014241 |
| 5543 | PTPLA | CAAGAUUACCUGAGUCCAA | NM_014241 |
| 5544 | PTPLA | GAAAGGUGCUUCAUGGAGA | NM_014241 |
| 5545 | PTPLA | GAGAGGUGAUUGUAGAAAA | NM_014241 |
| 5546 | PTPLA | UGGUGAACUUCUUACAAUA | NM_014241 |
| 5547 | PTPLA | UGAGAUAGUUCACUGUUUA | NM_014241 |
| 5548 | PTPLA | UGACAGAGAUCACUCGCUA | NM_014241 |
| 5549 | PTPLA | GAUUAAAUGAUCUCUGCAA | NM_014241 |
| 5550 | PTPLA | CAAGUGAGUUCAAGAAUCU | NM_014241 |
| 5551 | PTPLA | CCACAACUCUAUUUUCAUA | NM_014241 |
| 5552 | PTPLA | ACACACAGAGGUUUAUAUA | NM_014241 |
| 5553 | PTPLA | UGUUGGAGUUGCUGGUGAA | NM_014241 |
| 5554 | PTPLA | CUUAUAUCCUGUUGGAGUU | NM_014241 |
| 5555 | PTPLA | GAGAUAGUUCACUGUUUAA | NM_014241 |
| 5556 | PTPLA | GUAUAAAACCAAUCCAGAA | NM_014241 |
| 5557 | PTPLA | CCAAGUGAGUUCAAGAAUC | NM_014241 |
| 5558 | PTPLA | GGUCCAAGUGAGUUCAAGA | NM_014241 |
| 5559 | PTPLA | GUGGUUGGUUCUAGCUAUU | NM_014241 |
| 5560 | PTPLA | AAUCCAGAAUGAAGAGAGU | NM_014241 |
| 5561 | PTPLA | AGACAUUUGCCUUGCUUGA | NM_014241 |
| 5562 | PTPLA | AUGGAGAGGUGAUUGUAGA | NM_014241 |
| 5563 | PTPLA | CCAGAAUAACCAAGAUUAC | NM_014241 |
| 5564 | PTPLA | UAAAUGGGCCAGAUAUAAU | NM_014241 |
| 5565 | PTPLA | GGAGAGGUGAUUGUAGAAA | NM_014241 |
| 5566 | PTPLA | UAUGUUACGUCAAAGAAGA | NM_014241 |
| 5567 | PTPLA | AACCAUGGCAUCAUAUAUA | NM_014241 |
| 5568 | PTPLA | GUUCACUGUUUAAUUGGAA | NM_014241 |
| 5569 | PTPLA | AGUAUUCAGAAGACACUUA | NM_014241 |
| 5570 | PTPN1 | CCAAGAAACUCGAGAGAUC | NM_002827 |
| 5571 | PTPN1 | GCACAAUACUGGCCACAAA | NM_002827 |
| 5572 | PTPN1 | UUACAAUGGCCAUGGAAUA | NM_002827 |
| 5573 | PTPN1 | AGAAAGUGCUGUUAGAAAU | NM_002827 |
| 5574 | PTPN1 | CUGAAGAUAUCAAGUCAUA | NM_002827 |
| 5575 | PTPN1 | CUGAAGACCUCCACAUUAA | NM_002827 |
| 5576 | PTPN1 | UUUCAAAGUCCGAGAGUCA | NM_002827 |
| 5577 | PtPN1 | GGAUUAAACUACAUCAAGA | NM_002827 |
| 5578 | PTPN1 | AAGAAAGUGCUGUUAGAAA | NM_002827 |
| 5579 | PTPN1 | CAACAGAGUGAUGGAGAAA | NM_002827 |
| 5580 | PTPN1 | CCGAGAAGGACGAGGACCA | NM_002827 |
| 5581 | PTPN1 | GGACGUUGGUUCUGCACUA | NM_002827 |
| 5582 | PTPN1 | CGAAAUAGGUACAGAGACG | NM_002827 |
| 5583 | PTPN1 | GGAAGAAGCCCAAAGGAGU | NM_002827 |
| 5584 | PTPN1 | GAGAAAGGUUCGUUAAAAU | NM_002827 |
| 5585 | PTPN1 | UCAACAGAGUGAUGGAGAA | NM_002827 |
| 5586 | PTPN1 | UUAGUGAUAUUGUGGGUAA | NM_002827 |
| 5587 | PTPN1 | AAAUGGACGUACUGGUUUA | NM_002827 |
| 5588 | PTPN1 | AGGAAGAGACCCAGGAGGA | NM_002827 |
| 5589 | PTPN1 | CAUCAAGGGCUUUAUCAAA | NM_002827 |
| 5590 | PTPN1 | UCAAGAAAGUGCUGUUAGA | NM_002827 |
| 5591 | PTPN1 | GAAGAGACCCAGGAGGAUA | NM_002827 |
| 5592 | PTPN1 | CUAUAUGCCUUAAGCCAAU | NM_002827 |
| 5593 | PTPN1 | CAAAGGAGUUACAUUCUUA | NM_002827 |
| 5594 | PTPN1 | GAAGAAGCCCAAAGGAGUU | NM_002827 |
| 5595 | PTPN1 | AAGAGACCCAGGAGGAUAA | NM_002827 |
| 5596 | PTPN1 | GGAGCCACACAAUGGGAAA | NM_002827 |
| 5597 | PTPN1 | AAGCAUGAGUCAAGACACU | NM_002827 |
| 5598 | PTPN1 | UGGAGAAAGGUUCGUUAAA | NM_002827 |
| 5599 | PTPN1 | GGAAGGAGGACGGUUGUAA | NM_002827 |
| 5600 | PTPN11 | GGAAAGAAGCAGAGAAAUU | NM_002834 |
| 5601 | PTPN11 | CGACGUUGGUGGAGGAGAA | NM_002834 |
| 5602 | PTPN11 | UGGGAAAGAAGCAGAGAAA | NM_002834 |
| 5603 | PTPN11 | CACCAGAAGUUGUGCAUUA | NM_080601 |
| 5604 | PTPN11 | GGGAAGAAUUUGAGACACU | NM_002834 |
| 5605 | PTPN11 | UGACAGAUCUUGUGGAACA | NM_080601 |
| 5606 | PTPN11 | UGACAUCAUCAGAGAGAAA | NM_002834 |
| 5607 | PTPN11 | GCAAGAAAGUUUAUGUGAA | NM_002834 |
| 5608 | PTPN11 | GCUCAUGACUAUACGCUAA | NM_002834 |
| 5609 | PTPN11 | GGACAAGGGAAUACGGAGA | NM_002834 |
| 5610 | PTPN11 | GGGCACGAAUAUACAAAUA | NM_002834 |
| 5611 | PTPN11 | GGAUUGAAGAAGAGCAGAA | NM_002834 |
| 5612 | PTPN11 | GCGCACUGGUGAUGACAAA | NM_002834 |
| 5613 | PTPN11 | GGAAAGAGUAAAUGUGUCA | NM_002834 |
| 5614 | PTPN11 | OGAAAGAAGUGGAGAGAGG | NM_002834 |
| 5615 | PTPN11 | GUUAGGAACGUCAAAGAAA | NM_080601 |
| 5616 | PTPN11 | CUGAGUUGGUCCAGUAUUA | NM_002834 |
| 5617 | PTPN11 | UGGAGAGAGGAAAGAGUAA | NM_002834 |
| 5618 | PTPN11 | CAGAUUACAUCAAUGCAAA | NM_080601 |
| 5619 | PTPN11 | GAGAGAGGAAAGAGUAAAU | NM_002834 |
| 5620 | PTPN11 | GAGAUGUCAUUGAGCUUAA | NM_002834 |
| 5621 | PTPN11 | GAGAGAAGACAGUGCUAGA | NM_002834 |
| 5622 | PTPN11 | GAGGAAAGGGCACGAAUAU | NM_002834 |
| 5623 | PTPN11 | GGAGAUGGUUUCACCCAAA | NM_002834 |
| 5624 | PTPN11 | AAACAAGGCUUUUGGGAAG | NM_002834 |
| 5625 | PTPN11 | GUAUAAAUGCUGCUGAAAU | NM_002834 |
| 5626 | PTPN11 | UGGAGGAGGUGCACCAUAA | NM_002834 |
| 5627 | PTPN11 | AGAAAUAGAUGUGGACUUU | NM_002834 |
| 5628 | PTPN11 | GACCACAGAUAAAGUCAAA | NM_080601 |
| 5629 | PTPN11 | GAAAGAAGCAGAGAAAUUA | NM_002834 |
| 5630 | PTPN12 | GGAAUUAAGUUCAGAUCUA | NM_002835 |
| 5631 | PTPN12 | CAGCAGACCUCAACAGAAA | NM_002835 |
| 5632 | PTPN12 | GGAAAAUACCAGAGGAAUU | NM_002835 |
| 5633 | PTPN12 | UGACAAGAGAGAACAAAUA | NM_002835 |
| 5634 | PTPN12 | GAGGAAAUAUCAAGAACAU | NM_002835 |
| 5635 | PTPN12 | GGAAAUAUCAAGAACAUGA | NM_002835 |
| 5636 | PTPN12 | GGACAAUGAUAGAUACCAU | NM_002835 |
| 5637 | PTPN12 | GGAUGAUAUGGGAGUAUAA | NM_002835 |
| 5638 | PTPN12 | UGAUAAGCUUAAUGAGGAA | NM_002835 |
| 5640 | PTPN12 | CCACUGAAAGCCAGAUUUA | NM_002835 |
| 5641 | PTPN12 | GGGAACACACUUUUGAAUA | NM_002835 |
| 5642 | PTPN12 | GCAUAUGGUUUCAUCAGAA | NM_002835 |
| 5643 | PTPN12 | GUACAGGGCAAGUAGGUAU | NM_002835 |
| 5644 | PTPN12 | UCUCUAAGCCACAGGAAUU | NM_002835 |
| 5645 | PTPN12 | ACUAAAAGCUGGGAAAAUA | NM_002835 |
| 5646 | PTPN12 | CAACAGAAGCCACAGAUAU | NM_002835 |
| 5647 | PTPN12 | UGGAAGAACAGGUGCCAUU | NM_002835 |
| 5648 | PTPN12 | ACUGAAAGCCAGAUUUAUA | NM_002835 |
| 5649 | PTPN12 | GUGCUGUGACCCAGAAUAA | NM_002835 |
| 5650 | PTPN12 | ACAUAAUAUAGCAGGAACA | NM_002835 |
| 5651 | PTPN12 | CAGACUAUAUCAAUGCAAA | NM_002835 |
| 5652 | PTPN12 | UAAUAUAGCAGGAACAACA | NM_002835 |
| 5653 | PTPN12 | UGAUUUAUCUGAAGGCAAU | NM_002835 |
| 5654 | PTPN12 | CAACAAUUGAACAGAUAGA | NM_002835 |
| 5655 | PTPN12 | GCUGAUGGAGUGAAUGAAA | NM_002835 |
| 5656 | PTPN12 | GGAUGCUAAAGAAGAAAUA | NM_002835 |
| 5657 | PTPN12 | AAACAAAGGAGCAAUAUGA | NM_002835 |
| 5658 | PTPN12 | AGUCAGAGAUUCAGUAAGU | NM_002835 |
| 5659 | PTPN12 | CAGACUCAGAUGAAAGAAA | NM_002835 |
| 5660 | PTPN13 | GUGGAAACACUGAGAAAUA | NM_080683 |
| 5661 | PTPN13 | CCAUGAAGAUUCUGAUAAA | NM_080683 |
| 5662 | PTPN13 | GAAAGAAGAACCAAAGAAA | NM_080685 |
| 5663 | PTPN13 | GGAAAGAAGAGUUCGUUUA | NM_080684 |
| 5664 | PTPN13 | UGGACGAGUUCUAGAAUUA | NM_080683 |
| 5665 | PTPN13 | ACAAAGAGGAGUUGGGUUU | NM_006264 |
| 5666 | PTPN13 | GGAAGUUAACAGAGCAUUA | NM_080684 |
| 5667 | PTPN13 | GGACCGAAUCCGAGAGAGA | NM_006264 |
| 5668 | PTPN13 | AGAAAUUGCCCUAGAAACA | NM_080683 |
| 5669 | PTPN13 | GGGAACUGCUCCAGAAGUA | NM_080684 |
| 5670 | PTPN13 | AGAAGGAAGAACAGAUAUA | NM_080685 |
| 5671 | PTPN13 | CAUGAUGACUCAAGAAGUA | NM_080684 |
| 5672 | PTPN13 | GAGAAGAAGUGAAGCCUCA | NM_006264 |
| 5673 | PTPN13 | UAAGAUACCAGUUGGGAAA | NM_080683 |
| 5674 | PTPN13 | AAGGGAAGAAUGAGGAUAA | NM_080685 |
| 5675 | PTPN13 | UAACAAAGGGCUUAGUAAA | NM_006264 |
| 5676 | PTPN13 | ACGUGAAACACUUGGUAAA | NM_080683 |
| 5677 | PTPN13 | GGAAAGAAGAACCAAAGAA | NM_080685 |
| 5678 | PTPN13 | GGAAAUUGAUACUGCGCUU | NM_080684 |
| 5679 | PTPN13 | UGAAAGUCUCCAAGAAUUA | NM_080685 |
| 5680 | PTPN13 | GAGAAUUAUUUCAAGGACA | NM_080683 |
| 5681 | PTPN13 | AAGCAGAAGAAGAGCAAAA | NM_080683 |
| 5663 | PTPN13 | CAUCAAAGAUACACAAGAU | NM_080685 |
| 5684 | PTPN13 | CCAAAGACUGACAGAAUAU | NM_080683 |
| 5685 | PTPN13 | CUAAGGAGCUGGAGAAUCU | NM_006264 |
| 5686 | PTPN13 | GCCAAAGACUGACAGAAUA | NM_080683 |
| 5687 | PTPN13 | UCAAGAAGUAGAAGGAGAA | NM_080685 |
| 5688 | PTPN13 | AGGGAUCCGUUAAGAGAAA | NM_080683 |
| 5689 | PTPN13 | CCAAAGGCAAUCAGAGAAU | NM_080683 |
| 5690 | PTPN14 | GAACAGAAUUGGAAGACAA | NM_005401 |
| 5691 | PTPN14 | GGAGAAACCUCUGAAGAAA | NM_005401 |
| 5692 | PTPN14 | GCUACAACGUCCUGAGCAA | NM_005401 |
| 5693 | PTPN14 | CCACAAGAUAUCAGUAUUA | NM_005401 |
| 5694 | PTPN14 | GGUGGAAAGCACAGGGCAA | NM_005401 |
| 5695 | PTPN14 | CAGAGGAACCCAAAGAAUA | NM_005401 |
| 5696 | PTPN14 | UGAGCAAAUUCCAAAGAAA | NM_005401 |
| 5697 | PTPN14 | UCACAGAAUAUGAGCAAAU | NM_005401 |
| 5698 | PTPN14 | AGAGGAACCCAAAGAAUAA | NM_005401 |
| 5699 | PTPN14 | GGUCCAAGGAAGAGUGUGA | NM_005401 |
| 5700 | PTPN14 | GAAGAAACAUCUGGACAAA | NM_005401 |
| 5701 | PTPN14 | UGAAGAAACAUCUGGACAA | NM_005401 |
| 5702 | PTPN14 | AGAAACAUCUGGACAAAUU | NM_005401 |
| 5703 | PTPN14 | AGAAACUAGAAGAGGGAAU | NM_005401 |
| 5704 | PTPN14 | AGACAGCAUUAUAGAGAGA | NM_005401 |
| 5705 | PTPN14 | CAAGGAAGAGUGUGAGCAA | NM_005401 |
| 5706 | PTPN14 | GAAGACAAGCGGUAAUAUA | NM_005401 |
| 5707 | PTPN14 | GGAUGGAUUUGGACAGGAA | NM_005401 |
| 5708 | PTPN14 | UGGAGAAACCUCUGAAGAA | NM_005401 |
| 5709 | PTPN14 | GAGCAAAUUCCAAAGAAAA | NM_005401 |
| 5710 | PTPN14 | GAUCAGGAAUCUAGAGAAG | NM_005401 |
| 5711 | PTPN14 | GGAAGAGAAUCGAGUUGAU | NM_005401 |
| 5712 | PTPN14 | UGUCAUGGCUUCAGCAAGA | NM_005401 |
| 5713 | PTPN14 | GUUCACAGAAUAUGAGCAA | NM_005401 |
| 5714 | PTPN14 | GCAAGAGGCCACAAGAUAU | NM_005401 |
| 5715 | PTPN14 | GGUGAGCACUACUCGGAAA | NM_005401 |
| 5716 | PTPN14 | GAAGAAACUAGAAGAGGGA | NM_005401 |
| 5717 | PTPN14 | CCCACAUGCUUAAGAACUA | NM_005401 |
| 5718 | PTPN14 | GGAAUGGUGUUCACAGAAU | NM_005401 |
| 5719 | PTPN14 | CCUCAGAGAGUAUGUGCUA | NM_005401 |
| 5720 | PTPN18 | AGCCAAAGCUUCAGAGAUA | NM_014369 |
| 5721 | PTPN18 | UCAGAUUACUAGACAGAUA | NM_014369 |
| 5722 | PTPN18 | CCAGAGAACGUGAGGAAGA | NM_014369 |
| 5723 | PTPN18 | GGCCAGAGAACGUGAGGAA | NM_014369 |
| 5724 | PTPN18 | ACAAAGACGUGCUGCCUUA | NM_014369 |
| 5725 | PTPN18 | CCAGAUAGGCAGACAGACA | NM_014369 |
| 5726 | PTPN18 | GGGCAUGACCCCUGAGUUA | NM_014369 |
| 5727 | PTPN18 | CCACCAACCUGGACAGACA | NM_014369 |
| 5728 | PTPN18 | CAAGAAAGAAGAUCAGGAA | NM_014369 |
| 5729 | PTPN18 | GCGACUACAUUAAUGGCAA | NM_014369 |
| 5730 | PTPN18 | GGAAAAGGUGUGAGCGGUA | NM_014369 |
| 5731 | PTPN18 | GGGCCUGGAUCAAAGUUAA | NM_014369 |
| 5732 | PTPN18 | CCAGAACAUCAAAGAGAAU | NM_014369 |
| 5733 | PTPN18 | GGAAGAACCGCUACAAAGA | NM_014369 |
| 5734 | PTPN18 | GGACACAGCGACUACAUUA | NM_014369 |
| 5735 | PTPN18 | GCACAGAGCAGAUUCAAGA | NM_014369 |
| 5736 | PTPN18 | GUACACAUCUCCAGCUAUU | NM_014369 |
| 5737 | PTPN18 | AGAGCAGAUUCAAGAAAGA | NM_014369 |
| 5738 | PTPN18 | GAUAGAGAAUGGGCGGAAA | NM_014369 |
| 5739 | PTPN18 | GGACAGACAGCCAAAGCUU | NM_014369 |
| 5740 | PTPN18 | CAGAGAACGUGAGGAAGAA | NM_014369 |
| 5741 | PTPN18 | GAGGAAGAACCGCUACAAA | NM_014369 |
| 5742 | PTPN18 | CCACAGCCAAGCAGAUUAA | NM_014369 |
| 5743 | PTPN18 | CUGUCGAGAGAUAGAGAAU | NM_014369 |
| 5744 | PTPN18 | AGGAGAAGUGGCUGAAUGA | NM_014369 |
| 5745 | PTPN18 | CAGACAGACUCCUAACCAA | NM_014369 |
| 5746 | PTPN18 | CCUAAGAUUUGAAACACUU | NM_014369 |
| 5747 | PTPN18 | GGAUCAAAGUUAAAGUUUC | NM_014369 |
| 5748 | PTPN18 | AGAACUAAGCCAGGCAUAA | NM_014369 |
| 5749 | PTPN18 | GAGGAGGUAGCUAGGGUAU | NM_014369 |
| 5750 | PTPN2 | CAGAAUAGGUCUAGAAGAA | NM_002828 |
| 5751 | PTPN2 | GUAGAAAGAUGUACAAGAA | NM_080422 |
| 5752 | PTPN2 | AGACUGAAGUUUUGAAGUA | NM_002828 |
| 5753 | PTPN2 | GCAGUUAGAAGUUGGAAUA | NM_002828 |
| 5754 | PTPN2 | CUACGUUAUUGGAAAGAAA | NM_002828 |
| 5755 | PTPN2 | CAGAUGAAACAGAGGCUAA | NM_080422 |
| 5756 | PTPN2 | CUUAAGCAUUUCAGGGUAA | NM_002828 |
| 5757 | PTPN2 | AAACAGAAAUCGAAACAGA | NM_002828 |
| 5758 | PTPN2 | GAAUAGGUCUAGAAGAAGA | NM_080422 |
| 5759 | PTPN2 | GCACUUGAUAUAAGCAAUA | NM_002828 |
| 5760 | PTPN2 | CAGAAGAUGUGAAGUCGUA | NM_002828 |
| 5761 | PTPN2 | CCAGCAAGCUUCUGCACUA | NM_002828 |
| 5762 | PTPN2 | ACAGAAAUCGAAACAGAUA | NM_002828 |
| 5763 | PTPN2 | CCAUUGAUGUGCAAAGCAA | NM_080422 |
| 5764 | PTPN2 | CGAAACAGAUACAGAGAUG | NM_080422 |
| 5765 | PTPN2 | GAAACAGGAUUCAGUGUGA | NM_002828 |
| 5766 | PTPN2 | GAACAGAAUAGGUCUAGAA | NM_080422 |
| 5767 | PTPN2 | GGUGAAACCAGAACAAUAU | NM_002828 |
| 5768 | PTPN2 | GUGCAAAGCAAGACCUGAA | NM_080422 |
| 5769 | PTPN2 | UGGAGAAAGAAUCGGUUAA | NM_080422 |
| 5770 | PTPN2 | CAAAGGAGUUACAUCUUAA | NM_080422 |
| 5771 | PTPN2 | GAGAUGCUGUUUMAGAAA | NM_002828 |
| 5772 | PTPN2 | GUUUAAAGUGAGAGAAUCU | NM_080423 |
| 5773 | PTPN2 | AAGAUACAAUGGAGGAGAA | NM_002828 |
| 5774 | PTPN2 | GAUGUGAAGUCGUAUUAUA | NM_002828 |
| 5775 | PTPN2 | CCUCACAGUUGUUUGUUUA | NM_080422 |
| 5776 | PTPN2 | GUGUGAAGCUCUUGUCAGA | NM_002828 |
| 5777 | PTPN2 | GCAGUAGAAUAGACAUCAA | NM_002828 |
| 5778 | PTPN2 | GGAGAAAGAAUCGGUUAAA | NM_002828 |
| 5779 | PTPN2 | AAACAGAGGCUAAAUGAGA | NM_080422 |
| 5780 | PTPN21 | CAGAAGACCUCAAGGGAUU | NM_007039 |
| 5781 | PTPN21 | GGAACAACGAUUAGAACAA | NM_007039 |
| 5782 | PTPN21 | CAUUAGAGCUGGCAAAUAA | NM_007039 |
| 5783 | PTPN21 | UGAAGAAGCAGCUGGAUAA | NM_007039 |
| 5784 | PTPN21 | GAGAAGAGCUUUAGGUACU | NM_007039 |
| 5785 | PTPN21 | GAGAAGAGGAUGAUGGACA | NM_007039 |
| 5786 | PTPN21 | AGAAGCAGCUGGAUAAAUA | NM_007039 |
| 5787 | PTPN21 | CAGAAUACCUGUCAAGAUU | NM_007039 |
| 5788 | PTPN21 | GGAUAAAUAUGCAUUGGAA | NM_007039 |
| 5789 | PTPN21 | CUGAAAAUGCAGAAAGAAA | NM_007039 |
| 5790 | PTPN21 | AGAAAGAAAUCGAUUCCAA | NM_007039 |
| 5791 | PTPN21 | CCACAGGCCUGAAGAUGAA | NM_007039 |
| 5792 | PTPN21 | GCACCAACUCCUUAAAUAA | NM_007039 |
| 5793 | PTPN2 | GGAAGGGAGAAGAGCUUUA | NM_007039 |
| 5794 | PTPN21 | GCUAUGGAGAAGAGAGCUA | NM_007039 |
| 5795 | PTPN21 | CAAAUAAAGAGGAGACCAU | NM_007039 |
| 5796 | PTPN21 | ACACAAGAAUGGAAGGCAU | NM_007039 |
| 5797 | PTPN21 | UGCAGGAGGUAGAGAGAAU | NM_007039 |
| 5798 | PTPN21 | UAGCCAAGGAAGUGACAUA | NM_007039 |
| 5799 | PTPN21 | ACAAUGAGGUGCUGGACAU | NM_007039 |
| 5800 | PTPN21 | GGACUGGCGUGGUGAUUUU | NM_007039 |
| 5801 | PTPN21 | GGAUCCAACUGCUUAAUAA | NM_007039 |
| 5802 | PTPN21 | CCUUACUACAUCAGAAAUA | NM_007039 |
| 5803 | PTPN21 | UGGUAUGGGAACAGGGAAU | NM_007039 |
| 5804 | PTPN21 | CUGAAAAGCUCCAGGCUCA | NM_007039 |
| 5805 | PTPN21 | GGGAGAAGAGCUUUAGGUA | NM_007039 |
| 5806 | PTPN21 | AGAACAAGCAAUUCAGCUA | NM_007039 |
| 5807 | PTPN21 | UUGAAGAAGCAGCUGGAUA | NM_007039 |
| 5808 | PTPN21 | GAGCGUGUCUUGAAGGUAU | NM_007039 |
| 5809 | PTPN21 | AGGAGGAGGACGAGGACUU | NM_007039 |
| 5810 | PTPN22 | CCAAGGAGGUGGACAGCAA | NM_015967 |
| 5811 | PTPN22 | AGACCAAGCAAGAGUGUAA | NM_012411 |
| 5812 | PTPN22 | GCAUUGUAUUCCUGAGAAA | NM_015967 |
| 5813 | PTPN22 | CUUUAGGACUUCUGAAAUA | NM_015967 |
| 5814 | PTPN22 | GCUGAGAAGCCCAAGAAUA | NM_015967 |
| 5815 | PTPN22 | GUAUGAAAUGGGAAAGAAA | NM_012411 |
| 5816 | PTPN22 | AGAUAAACAUUCUGGAACA | NM_012411 |
| 5817 | PTPN22 | CGUAAUGCCUCUAAUGUAA | NM_012411 |
| 5818 | PTPN22 | GGAUAAUUCCUGAGAACUU | NM_012411 |
| 5819 | PTPN22 | GAACAGAGAGUCAAGCAAA | NM_015967 |
| 5820 | PTPN22 | CUGAGAAGCCCAAGAAUAU | NM_015967 |
| 5821 | PTPN22 | UUACAUACCUUUAGUGGAA | NM_012411 |
| 5822 | PTPN22 | CAUCUGAACCAAAGAAAUU | NM_012411 |
| 5823 | PTPN22 | GUGGAAAACUGGAAUAUUA | NM_015967 |
| 5824 | PTPN22 | GCCCAAGAAUAUCAAGAAA | NM_015967 |
| 5825 | PTPN22 | UGGAGUAUGAAAUGGGAAA | NM_012411 |
| 5826 | PTPN22 | UCAAAUAACUCCAGCUCAU | NM_015967 |
| 5827 | PTPN22 | CCUCAGCUGUGAAGGUAAA | NM_012411 |
| 5828 | PTPN22 | GCCCAAAGCAAGAAAAUUA | NM_012411 |
| 5829 | PTPN22 | ACAGAAUGCUAUAUGAGAA | NM_015967 |
| 5830 | PTPN22 | GCUGAGAAUGCCAAGAAUA | NM_012411 |
| 5831 | PTPN22 | GGAUGUACGUUGUUACCAA | NM_012411 |
| 5832 | PTPN22 | UGUAAAUGCAGCAGGAAGA | NM_012411 |
| 5833 | PTPN22 | GGAGGAUGAUUUGGGAAUA | NM_012411 |
| 5834 | PTPN22 | UGGAAGGACUGGUGUUAUU | NM_012411 |
| 5835 | PTPN22 | GGCCCAAUCUAUAGAAACA | NM_015967 |
| 5836 | PTPN22 | UUGAUACAGCAGAGAGAAA | NM_012411 |
| 5837 | PTPN22 | UCACAAGGAGUAAGAGUUU | NM_015967 |
| 5838 | PTPN22 | GAGAGAUGCAGCUGGAAUU | NM_012411 |
| 5839 | PTPN22 | GAGUAUACCUUGUAAAUCU | NM_015967 |
| 5840 | PTPN23 | ACGCAGAUCUGGAGAGCAA | NM_015466 |
| 5841 | PTPN23 | GGAAGAAACUUGUGCAGAU | NM_015466 |
| 5842 | PTPN23 | UGGCCAAGAUUGAGGACAA | NM_015466 |
| 5843 | PTPN23 | GUGCACAGGUGGUAGAUUA | NM_015466 |
| 5844 | PTPN23 | GCAAACAGCGGAUGAGCAA | NM_015466 |
| 5845 | PTPN23 | ACAGGGAGCUGAAGAAGAA | NM_015466 |
| 5846 | PTPN23 | ACUCAGAGAUGAAGAAGUU | NM_015466 |
| 5847 | PTPN23 | UGGCUAAGGUGCAGGAGAU | NM_015466 |
| 5848 | PTPN23 | GAAGAAUUAUGGAGAGAAC | NM_015466 |
| 5849 | PTPN23 | ACAAUGAAGAACUGAAGAA | NM_015466 |
| 5850 | PTPN23 | AGAUUGAGGACAAGAAUGA | NM_015466 |
| 5851 | PTPN23 | GAGAAUGGGCCAAGUACAU | NM_015466 |
| 5852 | PTPN23 | GCAUGCGGCAGCAGAGAAA | NM_015466 |
| 5853 | PTPN23 | AGUUUGUCCUGAAGAAUUA | NM_015466 |
| 5854 | PTPN23 | CUGAAGAAUUAUGGAGAGA | NM_015466 |
| 5855 | PTPN23 | GAGAGAACCCAGAAGCCUA | NM_015466 |
| 5856 | PTPN23 | AGAAGUCGAUGUUGGACAA | NM_015466 |
| 5857 | PTPN23 | AGGCUGAGAUGGAGAAGCA | NM_015466 |
| 5858 | PTPN23 | CAGAAGGACUGGAAGAAAC | NM_015466 |
| 5859 | PTPN23 | GCAGAAAGUGUCAGUCAUU | NM_015466 |
| 5860 | PTPN23 | GAGCAGAAAGUGUCAGUCA | NM_015466 |
| 5861 | PTPN23 | GCUGAGAUGGAGAAGCAAA | NM_015466 |
| 5862 | PTPN23 | AGAAGUUUGUCCUGAAGAA | NM_015466 |
| 5863 | PTPN23 | CCUAUGAGGACCUGAUGAA | NM_015466 |
| 5864 | PTPN23 | AGAAGUUGUUCGAGGAGCA | NM_015466 |
| 5865 | PTPN23 | AUGAGGACCUGAUGAAGAA | NM_015466 |
| 5866 | PTPN23 | CCAAGAAGGACAACGACUU | NM_015466 |
| 5867 | PTPN23 | GCAGAGGUGAGGCGAGAAU | NM_015466 |
| 5868 | PTPN23 | UGAAGAAGUUUGUCCUGAA | NM_015466 |
| 5869 | PTPN23 | UGGACAACCUUGAUGCCUA | NM_015466 |
| 5870 | PTPN3 | GGGUAUUAUUGCAGGGAAA | NM_002829 |
| 5871 | PTPN3 | GUACAGACCUUUAAAGUUA | NM_002829 |
| 5872 | PTPN3 | GAGAAAUGCUGGUCACAAA | NM_002829 |
| 5873 | PTPN3 | GGAGUUACCCAAAGAGAAA | NM_002829 |
| 5874 | PTPN3 | GUAAUUGAACCAUGGGAAA | NM_002829 |
| 5875 | PTPN3 | UGAAGAAGGUUUAGUCCAA | NM_002829 |
| 5876 | PTPN3 | GCAACAAGAUGGUGUGGUU | NM_002829 |
| 5877 | PTPN3 | UGACAGGAUUGUAGCAAAU | NM_002829 |
| 5878 | PTPN3 | GAUCAGAAGUUGUCACUCA | NM_002829 |
| 5879 | PTPN3 | GCAGGGAAAUGAAGAUUAU | NM_002829 |
| 5880 | PTPN3 | AUAAAGAUGUGCUGCCUUA | NM_002829 |
| 5881 | PTPN3 | GGAAGAACACACAGUGACA | NM_002829 |
| 5882 | PTPN3 | GAAAAGAGCUUCUAGUAAU | NM_002829 |
| 5883 | PTPN3 | GUGACAGGAUUGUAGCAAA | NM_002829 |
| 5884 | PTPN3 | GGGAUCAAAUCGUGUUAAU | NM_002829 |
| 5885 | PTPN3 | CACCAGAUGAAGAUGGAAA | NM_002829 |
| 5886 | PTPN3 | GUGAAUACCGUGUUAAAUU | NM_002829 |
| 5887 | PTPN3 | GCACGAAAUCCGAAAGCCA | NM_002829 |
| 5888 | PTPN3 | GCCUAUGUGUCCCGAGAAA | NM_002829 |
| 5889 | PTPN3 | AAGGAUAAACCCAGAGUCA | NM_002829 |
| 5890 | PTPN3 | CAGAUAACCUUGCAAAUGA | NM_002829 |
| 5891 | PTPN3 | CAUAGGAACUGGUGUAGAU | NM_002829 |
| 5892 | PTPN3 | CCAUUUACCCACUGGAUAU | NM_002829 |
| 5893 | PTPN3 | AGGUGGAGCUGGAACAAUU | NM_002829 |
| 5894 | PTPN3 | AGAGAAAACUCGAUCAGAA | NM_002829 |
| 5895 | PTPN3 | GAUCCAUGGCACAGCUAAA | NM_002829 |
| 5896 | PTPN3 | GGGAACAUAUUGUGGCCUU | NM_002829 |
| 5897 | PTPN3 | AGACCUAAUGAUUGGAAUU | NM_002829 |
| 5898 | PTPN3 | GAACGAGGGCGGACCAAAU | NM_002829 |
| 5899 | PTPN3 | GAUCAAAUCGUGUUAAUCA | NM_002829 |
| 5900 | PTPN4 | GCAUGAAUCUAGAGAAACA | NM_002830 |
| 5901 | PTPN4 | UUGCAUGAAUCUAGAGAAA | NM_002830 |
| 5902 | PTPN4 | GCAAAUAAAGACAGGGUAU | NM_002830 |
| 5903 | PTPN4 | GCAACAAGAUCUAGAAAGU | NM_002830 |
| 5904 | PTPN4 | CCAAAUUACCUCAGAAUAU | NM_002830 |
| 5905 | PTPN4 | GAGAAACAUUAUUGGGAUU | NM_002830 |
| 5906 | PTPN4 | CCAGUAUAUUCCUGAGAAA | NM_002830 |
| 5907 | PTPN4 | CCUAUUUAACCAAGAGAAA | NM_002830 |
| 5908 | PTPN4 | GCUGAUGAUUCCACAGAUA | NM_002830 |
| 5909 | PTPN4 | UGAAGAAGGCUUUGUUAAA | NM_002830 |
| 5910 | PTPN4 | AUGCAAGGGAUCAGAGUAA | NM_002830 |
| 5911 | PTPN4 | CAAUAAGGAAGCAGCUAAA | NM_002830 |
| 5912 | PTPN4 | GAUCAGAGUAACAAUGAAA | NM_002830 |
| 5913 | PTPN4 | GUGGAAAGCAUGUGUAGAA | NM_002830 |
| 5914 | PTPN4 | CCAACAAGUUACAAGAAGA | NM_002830 |
| 5915 | PTPN4 | GCACGGAAAUUAAUGGAUU | NM_002830 |
| 5916 | PTPN4 | GAAUGAAACCUGAUGAAAA | NM_002830 |
| 5917 | PTPN4 | CAAACAAACCAAUAAGGAA | NM_002830 |
| 5918 | PTPN4 | AGCGAAGUGUUUGUMAUCA | NM_002830 |
| 5919 | PTPN4 | GCAGAUGACUUGGGAACAA | NM_002830 |
| 5920 | PTPN4 | CAACAAGUUACAAGAAGAA | NM_002830 |
| 5921 | PTPN4 | CAAUGUAAAGGGAGGAUAU | NM_002830 |
| 5922 | PTPN4 | GGAAGAAAAGCUAGAAAAU | NM_002830 |
| 5923 | PTPN4 | CAGGAGGAAUUCUGAUUUA | NM_002830 |
| 5924 | PTPN4 | CCAAUAAGGAAGCAGCUAA | NM_002830 |
| 5925 | PTPN4 | GCAAAGAAAAGGCAAAUAA | NM_002830 |
| 5926 | PTPN4 | GGGAAGUAGUAAGCAGAAA | NM_002830 |
| 5927 | PTPN4 | GAACAGGGUACGAAUGAAU | NM_002830 |
| 5928 | PTPN4 | GGAAGUAGUAAGCAGAAAU | NM_002830 |
| 5929 | PTPN4 | AAGAGGAGGUGGAGAAGGA | NM_002830 |
| 5930 | PTPN5 | AGGAGAAGAUCGAGGAUGA | NM_032781 |
| 5931 | PTPN5 | CGAGAAAUGCACCGAGUAU | NM_032781 |
| 5932 | PTPN5 | GGUCACAGAACGCCACAAA | NM_032781 |
| 5933 | PTPN5 | GGAGGAGAUGAACGAGAAA | NM_032781 |
| 5934 | PTPN5 | GCCAGGAGUGAGAGAGAGA | NM_032781 |
| 5935 | PTPN5 | GCUGCAACGAGGAGGGCUU | NM_032781 |
| 5936 | PTPN5 | GAACUUUGUGGAUCCGAAA | NM_032781 |
| 5937 | PTPN5 | AGCGAGGCCUGAAGCAUUA | NM_032781 |
| 5938 | PTPN5 | GCCCGAGACUCCUGUGUUU | NM_032781 |
| 5939 | PTPN5 | GUACGACGGUGUUGAGAUC | NM_032781 |
| 5940 | PIPN5 | ACGAGGAGGGCUUUGGCUA | NM_032781 |
| 5941 | PTPN5 | GUCAUGAGCCUCUACGAAA | NM_032781 |
| 5942 | PTPN6 | GGGAGGAGUUUGAGAGUUU | NM_080548 |
| 5943 | PTPN6 | UGACAGAGCUGGUGGAGUA | NM_002831 |
| 5944 | PTPN6 | CAGACAAGGAGAAGAGCAA | NM_002831 |
| 5945 | PTPN6 | GGGAGGAGAAAGUGAAGAA | NM_002831 |
| 5946 | PTPN6 | GAGAAAGGCCGGAACAAAU | NM_080549 |
| 5947 | PTPN6 | AGAACAAGAGGGAGGAGAA | NM_002831 |
| 5948 | PTPN6 | GGCCAGAGAACAAGGGCAA | NM_002831 |
| 5949 | PTPN6 | GAACAAGAGGGAGGAGAAA | NM_080548 |
| 5950 | PTPN6 | GGAGAAAGGCCGGAACAAA | NM_002831 |
| 5951 | PTPN6 | AGGAGAAAGUGAAGAAGCA | NM_080548 |
| 5952 | PTPN6 | AGGAGGAAGUGGCUGAUUA | NM_080548 |
| 5953 | PTPN6 | GGUCAGCAGACAAGGAGAA | NM_002831 |
| 5954 | PTPN6 | GCAAGAACCGCUACAAGAA | NM_002831 |
| 5955 | PTPN6 | GGACGUUUCUUGUGCGUGA | NM_002831 |
| 5956 | PTPN6 | AGAAGCAGGAGGUGAAGAA | NM_002831 |
| 5957 | PTPN6 | AGACGGAGGCGCAGUACAA | NM_080549 |
| 5958 | PTPN6 | CCAACUACAUCAAGAACCA | NM_002831 |
| 5959 | PTPN6 | GGAACAAAUGCGUCCCAUA | NM_002831 |
| 5960 | PTPN6 | AGAAGAAGCUGGAGGUCCU | NM_002831 |
| 5961 | PTPN6 | UGACACAACCGAAUACAAA | NM_002831 |
| 5962 | PTPN6 | GAGCAUGACACAACCGAAU | NM_002831 |
| 5963 | PTPN6 | ACAAGGAGGAUGUGUAUGA | NM_002831 |
| 5964 | PTPN6 | ACACUAAGAACAAGAGGGA | NM_080548 |
| 5965 | PTPN6 | AGGAGGAUGUGUAUGAGAA | NM_002831 |
| 5966 | PTPN6 | AUACAAACUCCGUACCUUA | NM_080548 |
| 5967 | PTPN6 | GGGAGAAGUUUGCGACUCU | NM_002831 |
| 5968 | PTPN6 | GGGCCUGGACUGUGACAUU | NM_080548 |
| 5969 | PTPN6 | AAAUAAAGCCCUGGGAUCA | NM_080548 |
| 5970 | PTPN6 | ACAAGAGGGAGGAGAAAGU | NM_080549 |
| 5971 | PTPN6 | CAGAGCUGGUGGAGUACUA | NM_002831 |
| 5972 | PTPN7 | GCUGAAAGCCCGAGGAGAA | NM_002832 |
| 5973 | PTPN7 | CCACAGAAGAGGAAACCUA | NM_002832 |
| 5974 | PTPN7 | GAGUACACCUAGAGAGCUU | NM_002832 |
| 5975 | PTPN7 | CCAAGCAACUGGAAGAAGA | NM_002832 |
| 5976 | PTPN7 | CCAAAUAGAUCCUGUCCUU | NM_080588 |
| 5977 | PTPN7 | AGAACAAGGACUCUGGUUA | NM_002832 |
| 5978 | PTPN7 | CCAAGAAGCAUGUGCGACU | NM_002832 |
| 5979 | PTPN7 | GCUAUGACGGGAAGGAGAA | NM_002832 |
| 5980 | PTPN7 | UGAAAGAGUGCCCAGAAUA | NM_002832 |
| 5981 | PTPN7 | GGUACAAGCUCCAGAACAG | NM_002832 |
| 5982 | PTPN7 | CCGAGAGGGCAAGGAGAAA | NM_002832 |
| 5983 | PTPN7 | UGGCAGAGGUGGAGGAGAG | NM_002832 |
| 5984 | PTPN7 | AGACAGACOGACAGACAGA | NM_002832 |
| 5985 | PTPN7 | UGAAGAACACGCAGUGCUA | NM_002832 |
| 5986 | PTPN7 | GAGAUUACAUCAAUGCCAA | NM_002832 |
| 5987 | PTPN7 | GCACAGGCCAGAUGCAAGA | NM_080589 |
| 5988 | PTPN7 | CCAUCAGACACCAGAAUCA | NM_080588 |
| 5989 | PTPN7 | CAGAAUACACUGUGCGGCA | NM_002832 |
| 5990 | PTPN7 | AAGUGGACAUUCUGGGUAU | NM_002832 |
| 5991 | PTPN7 | ACAGGAAGCAGCAGCAGUA | NM_080588 |
| 5992 | PTPN7 | CGGCAGAGCAGUACCAGUU | NM_080588 |
| 5993 | PTPN7 | GAGCACAGCCGUUGACCUU | NM_080588 |
| 5994 | PTPN7 | GCAUCCAGGACAUGAAAGA | NM_080589 |
| 5995 | PTPN7 | GUGUCGGACUUCUGGGAGA | NM_080588 |
| 5996 | PTPN7 | GGGAAAGUGGGCCGAGUGA | NM_002832 |
| 5997 | PTPN7 | ACGGGAAGGAGAAGGUCUA | NM_002832 |
| 5998 | PTPN7 | AUGAAAGAGUGCCCAGAAU | NM_002832 |
| 5999 | PTPN7 | CAACUACAUCCGAGGCUAU | NM_002832 |
| 6000 | PTPN7 | GGGAGAUGGUGUGGCAAGA | NM_080588 |
| 6001 | PTPN7 | CAAGCAACUGGAAGAAGAA | NM_002832 |
| 6002 | PTPN9 | GAGAAUACCUAUCGUGAUU | NM_002833 |
| 6003 | PTPN9 | GCAAGGAAUCUAUGAGGAA | NM_002833 |
| 6004 | PTPN9 | GCUACAGAGUGGUGGAAGA | NM_002833 |
| 6005 | PTPN9 | GAUCAGACCUCAAUAAUUU | NM_002833 |
| 6006 | PTPN9 | GGAGAGGAUUCAAAUAUUA | NM_002833 |
| 6007 | PTPN9 | GGACCAAACUAGAGUGAAG | NM_002833 |
| 6008 | PTPN9 | GCUUUGAAACUCAGAGGAA | NM_002833 |
| 6009 | PTPN9 | AAGGAAUCUAUGAGGAAUA | NM_002833 |
| 6010 | PIPN9 | CUAGAUAAAUGUGGUGAAA | NM_002833 |
| 6011 | PTPN9 | GGAAUGGACUGGUGUUUAU | NM_002833 |
| 6012 | PTPN9 | GGAAGGAAGGCAUUGUAAA | NM_002833 |
| 6013 | PTPN9 | CAAACUAGAGUGAAGCUAA | NM_002833 |
| 6014 | PTPN9 | GAGGAAGGCGGCAGGAGAA | NM_002833 |
| 6015 | PTPN9 | CAGAGAAACUCGAAGGAAG | NM_002833 |
| 6016 | PTPN9 | UCGCAGAGAAGGAGGGCAU | NM_002833 |
| 6017 | PTPN9 | UCUUGAGAGUGGUCAGAAA | NM_002833 |
| 6018 | PTPN9 | AGACAUUCGUCGUGAGAAC | NM_002833 |
| 6019 | PTPN9 | GAAAACAACGCUAGAAAUU | NM_002833 |
| 6020 | PTPN9 | GGGAGAGGAUUCAAAUAUU | NM_002833 |
| 6021 | PTPN9 | GAACGGAGCGAAUAAUAUA | NM_002833 |
| 6022 | PTPN9 | UCCAGGAAACCUAGAGAAA | NM_002833 |
| 6023 | PTPN9 | GGCCAUACUCAGACAGAUU | NM_002833 |
| 6024 | PTPN9 | AAACAACGCUAGAAAUUCA | NM_002833 |
| 6025 | PTPN9 | CAGUACUGGCCUUUAGAAA | NM_002833 |
| 6026 | PTPN9 | UGAAGAAGGUGCUGAUUGU | NM_002833 |
| 6027 | PTPN9 | GUAAUAAGCUCUUUGAAUG | NM_002833 |
| 6028 | PTPN9 | CGGGAGAGGAUUCAAAUAU | NM_002833 |
| 6029 | PTPN9 | GCGUGGAGAACAUGAAUCA | NM_002833 |
| 6030 | PTPN9 | CCAAGCACGUUUAUAAGUA | NM_002833 |
| 6031 | PTPN9 | GGAACGGAGCGAAUAAUAU | NM_002833 |
| 6032 | PTPRA | GGACAGAAGAGAUGAGACA | NM_002836 |
| 6033 | PTPRA | GAUUAGAGGAGGAGUUUAA | NM_080840 |
| 6034 | PTPRA | GGAGAAUGGCAGACGACAA | NM_080841 |
| 6035 | PTPRA | UCUCAGAGCUCUCGAGGAA | NM_002836 |
| 6036 | PTPRA | AAGAAGAAACGGUGAAUGA | NM_002836 |
| 6037 | PTPRA | CGGCAGAACCAGUUAAAGA | NM_080840 |
| 6038 | PTPRA | GGACAAGCUGGAAGAGGAA | NM_002836 |
| 6039 | PTPRA | CAGCCAACAUGAAGAAGAA | NM_002836 |
| 6040 | PTPRA | CAGUUAAAGAAGAGGCCAA | NM_080840 |
| 6041 | PTPRA | GAAGAAGAACCGUGUUUUA | NM_002836 |
| 6042 | PTPRA | GGAUGAUGCAGUUCAAAUA | NM_080841 |
| 6043 | PTPRA | CGAAGAGAAUACAGACUAU | NM_002836 |
| 6044 | PTPRA | GGGACUAUCAGGUAAUAAA | NM_080840 |
| 6045 | PTPRA | GCGACAUGACCAACAGAAA | NM_002836 |
| 6046 | PTPRA | GCUACAAGGUGGUGCAGGA | NM_002836 |
| 6047 | PTPRA | GGAAUUAAAUAGUGUGAUG | NM_080840 |
| 6048 | PTPRA | AGGAGGAAUGUGAGAGCUA | NM_080840 |
| 6049 | PTPRA | ACAAGGUGGUGCAGGAGUA | NM_080840 |
| 6050 | PTPRA | CCAACCUGAAGGAGAGAAA | NM_002836 |
| 6051 | PTPRA | GAACGUGGCUUCCAGAUAA | NM_080840 |
| 6052 | PTPRA | GAAGAAACGGUGAAUGAUU | NM_080840 |
| 6053 | PTPRA | GAGAAUAAGAGCCGGCAGA | NM_002836 |
| 6054 | PTPRA | GCACCAACAUUCAGCCCAA | NM_080840 |
| 6055 | PTPRA | GGUAAUGGAUGAUGCAGUU | NM_002836 |
| 6056 | PTPRA | CUUCAUUCAUCAACGGUUA | NM_080840 |
| 6057 | PTPRA | GAAGUGACCUCUCUAGAAA | NM_080840 |
| 6058 | PTPRA | GCGAAGAGAAUACAGACUA | NM_080840 |
| 6059 | PTPRA | AGGAGGAGUUUAAGAAGUU | NM_080840 |
| 6060 | PTPRA | GAGAAUGGCAGACGACAAU | NM_080840 |
| 6061 | PTPRA | ACAAUAAGCUCUUCAGGGA | NM_080840 |
| 6062 | PTPRB | CUGAAGAGCUCCUGGAUAA | NM_002837 |
| 6063 | PTPRB | GCAAAGACCUCCUGGAAAU | NM_002837 |
| 6064 | PTPRB | CAGUAUUAGUGGAGACUUA | NM_002837 |
| 6065 | PTPRB | GAGCAGAGAUGGAGAGCUU | NM_002837 |
| 6066 | PTPRB | GGACAAAGCCUGACAAGAU | NM_002837 |
| 6067 | PTPRB | CCAGAAAGGUAACCGGAAA | NM_002637 |
| 6068 | PTPRB | CCAAUGGAGCUGUGAAAUA | NM_002837 |
| 6069 | PTPRB | UAGCAGAAUGGGAGAAAUA | NM_002837 |
| 6070 | PTPRB | GAGCCAUGGUCGAGAAAGA | NM_002837 |
| 6071 | PTPRB | AGGAAUACGAGGAGUUAAA | NM_002837 |
| 6072 | PTPRB | CCUCAGAGCAAGAAAGCUA | NM_002837 |
| 6073 | PTPRB | GAGUAAAGUGUGACCAUUA | NM_002837 |
| 6074 | PTPRB | CAGAACAUUUCCAGACAAA | NM_002837 |
| 6075 | PTPRB | CCAAAGAUGCCAAAGAAUU | NM_002837 |
| 6076 | PTPRB | AGAAAGUACUUCAUGGAAU | NM_002837 |
| 6077 | PTPRB | CCAAAGACUCUGUGGACAU | NM_002837 |
| 6078 | PTPRB | GCAAGAAAUACAAGAUACA | NM_002837 |
| 6079 | PTPRB | GCCGGAGAAUAGAGGGAAA | NM_002837 |
| 6080 | PTPRB | CAAGGAAUCCAGAGUAUUA | NM_002837 |
| 6081 | PTPRB | CCGGAGAUGUGGAUAACUA | NM_002837 |
| 6082 | PTPRB | GGCUGAUGCUAAUGGAUAA | NM_002837 |
| 6083 | PTPRB | GGUUCAAAUUCAAGAAAGU | NM_002837 |
| 6084 | PTPRB | UAAGAUAUGCGGUGAGGAA | NM_002837 |
| 6085 | PTPRB | CCAAGGAGACGUAGAAUUU | NM_002837 |
| 6086 | PTPRB | CCACUAAGCAACACAAAUU | NM_002837 |
| 6087 | PTPRB | GCUAAUGGAUAAAGGGAUC | NM_002837 |
| 6088 | PTPRB | CUGACAAAGUCCAGGGAGU | NM_002837 |
| 6089 | PTPRB | CCAAGGAAUACGAGGAGUU | NM_002837 |
| 6090 | PTPRB | GCAAGGAAGCCCAGACUGA | NM_002837 |
| 6091 | PTPRB | CUGGGAAUGUGGAACGAUA | NM_002837 |
| 6092 | PTPRC | CAGAAGAGGUAGUGGAUAU | NM_080922 |
| 6093 | PTPRC | CAGCAAAGCUAAAUGUUAA | NM_080922 |
| 6094 | PTPRC | GGAAAUGAGUAAAGAGAGU | NM_002838 |
| 6095 | PTPRC | GGUAAAAGCUCUACGCAAA | NM_080922 |
| 6096 | PTPRC | GCAUUAAGAAGGUAAGUAA | NM_080923 |
| 6097 | PTPRC | GUGCAUAACCUUACAGAAU | NM_080922 |
| 6098 | PTPRC | CUUUGAGACUAUUGAGAUA | NM_080923 |
| 6099 | PTPRC | GGACACAGCACAUUGGAAA | NM_080921 |
| 6100 | PTPRC | GAACAGAAAGCCACAGUUA | NM_080922 |
| 6101 | PTPRC | CAAACAAUGAGGUGCAUAA | NM_002838 |
| 6102 | PTPRC | GGAUGAAACUGUUGAUGAU | NM_080921 |
| 6103 | PTPRC | UGACAGUGAUUCAGAGGAA | NM_080922 |
| 6104 | PTPRC | ACACAGAGAUGCUGCAAAU | NM_080923 |
| 6105 | PTPRC | CAUUGGAAAUCAAGAAGAA | NM_002838 |
| 6106 | PTPRC | GAGAAACAGAAGUGAAUUU | NM_002838 |
| 6107 | PTPRC | CCUCAAAGAUCAUUUCAUA | NM_080921 |
| 6108 | PTPRC | GGAACAAGUGUGCAGAAUA | NM_080922 |
| 6109 | PTPRC | AAGCAAACAUAUGGAGAUA | NM_080921 |
| 6110 | PTPRC | CAGAGAUGCUGCAAAUAAA | NM_080923 |
| 6111 | PTPRC | GAAAUACUCUGGUUAGAAA | NM_080922 |
| 6112 | PTPRC | GUAAAGAGAGUGAGCAUGA | NM_002838 |
| 6113 | PTPRC | CAAACAUCACUGUGGAUUA | NM_080921 |
| 6114 | PTPRC | GAAUGGACAAGUAAAGAAA | NM_080922 |
| 6115 | PTPRC | GAUGAUUUCUGGAGGAUGA | NM_002838 |
| 6116 | PTPRC | UCAAAGAACCCAGGAAAUA | NM_080922 |
| 6117 | PTPRC | GGCUUAAACUCUUGGCAUU | NM_080923 |
| 6118 | PTPRC | GAGGAAGAUUGCUGAUGAA | NM_002838 |
| 6119 | PTPRC | AAACUGAGAAGGAGAGUGA | NM_080921 |
| 6120 | PTPRC | CAGGAGAGCCUCAGAUUAU | NM_080921 |
| 6121 | PTPRC | GAAGAUUGCUGAUGAAGGA | NM_002838 |
| 6122 | PTPRD | GAAGAAAUCUCGCGGGAAA | NM_002839 |
| 6123 | PTPRD | UGAAAUGGGCAGAGAGAA | NM_130391 |
| 6124 | PTPRD | GAAGAAAGAUCAAGGGUGA | NM_002839 |
| 6125 | PTPRD | CCAAAGUGGUCAAGAAUAU | NM_130391 |
| 6126 | PTPRD | GGAGAGAAGUUGAAUUAAA | NM_002839 |
| 6127 | PTPRD | CAGUAUAUCCUAAGGGAAU | NM_130391 |
| 6128 | PTPRD | CCAGAAAUCACUUGGUUUA | NM_002839 |
| 6129 | PTPRD | GAUCAAGGGUGAAGUGUGA | NM_130391 |
| 6130 | PTPRD | GAAUGGAGCUCGAAUUUAA | NM_130391 |
| 6131 | PTPRD | GAGGAUAUCAGGUGCAUUA | NM_130391 |
| 6132 | PTPRD | CCUCAAAUAAUGUGGGAGA | NM_002839 |
| 6133 | PTPRD | AAUAGAAACGGGAGAGAAU | NM_002839 |
| 6134 | PTPRD | CCACAUUGAAAGAUUGAAA | NM_002839 |
| 6135 | PTPRD | GGAAAGAAUGAGAUAUGAA | NM_002839 |
| 6136 | PTPRD | CGUCAUAGAUGCCAUGUUA | NM_130392 |
| 6137 | PTPRD | GGAGAGGAGCAACGAAUUA | NM_002839 |
| 6138 | PTPRD | UCAAAUAAUGUGGGAGAAA | NM_002839 |
| 6139 | PTPRD | UGGGAGAGAAGUUGAAUUA | NM_130391 |
| 6140 | PTPRD | GGGAGGAGAUGGUGAAGGA | NM_002839 |
| 6141 | PTPRD | GGUUCAAACAGAAGACCAA | NM_002839 |
| 6142 | PTPRD | UCUUUAUGAUGAUGGGAAA | NM_130391 |
| 6143 | PTPRD | UGUCAAAGCCUUACCCAAA | NM_130392 |
| 6144 | PTPRD | CCGAAGUGCCAGCUAGAAA | NM_002839 |
| 6145 | PTPRD | UGACAAGCCUCACGAGAUU | NM_002839 |
| 6146 | PTPRD | CCAACUACAUAGAUGGGUA | NM_130391 |
| 6147 | PTPRD | CCAUGUAACUUUAAUGAGA | NM_002839 |
| 6148 | PTPRD | GGAAAAUGGUAGAAGAAGU | NM_130391 |
| 6149 | PTPRD | GAAGAUCACUUUACAGCUA | NM_002839 |
| 6150 | PTPRD | GGUAAUAGAGUUUGACGAU | NM_002839 |
| 6151 | PTPRD | AGAAGAGAGAAGUGAGACA | NM_002839 |
| 6152 | PTPRE | CUACAUAGAUGGUUACAAA | NM_006504 |
| 6153 | PTPRE | GAAAGAAAGGAAAGAGGAA | NM_130435 |
| 6154 | PTPRE | CGAUUGAGAUAAAGAAUGA | NM_006504 |
| 6155 | PTPRE | GAGGAGGAGUUCAGGAAAU | NM_006504 |
| 6156 | PTPRE | AAGAAAGGAAAGAGGAAAA | NM_006504 |
| 6157 | PTPRE | AGGAGAGAGAGCAGGAUAA | NM_006504 |
| 6158 | PTPRE | CCUCAGGGCCCAAGAAGUA | NM_006504 |
| 6159 | PTPRE | GCUACAAAGUGGUACAAGA | NM_006504 |
| 6160 | PTPRE | GGUUACAAAGAGAAGAAUA | NM_130435 |
| 6161 | PTPRE | AGUUACUCAUGGAGAAAUA | NM_006504 |
| 6162 | PTPRE | CGGAGGUGCAGGAGAGAGA | NM_006504 |
| 6163 | PTPRE | GCGAACAGGUACAUUCAUA | NM_130435 |
| 6164 | PTPRE | ACAAAGUGGUACAAGAUUU | NM_006504 |
| 6165 | PTPRE | CCAAACAGGAAACGGUUAA | NM_130435 |
| 6166 | PTPRE | CUUCCUACAUAGAUGGUUA | NM_006504 |
| 6167 | PTPRE | GAGUAAAAGCCGAGGGACU | NM_130435 |
| 6168 | PTPRE | GGAUAAAUGCUACCAGUAU | NM_130435 |
| 6169 | PTPRE | CAUCAAUGCUUCOUACAUA | NM_130435 |
| 6170 | PTPRE | GAGAAUGGUCUGGGAGCAA | NM_006504 |
| 6171 | PTPRE | GGAUCAUGAAGGAGAACAU | NM_006504 |
| 6172 | PTPRE | CAGGAGAGAGAGCAGGAUA | NM_130435 |
| 6173 | PTPRE | CGAGGGACUUUUAGAUGUA | NM_006504 |
| 6174 | PTPRE | GAUAAAUGCUACCAGUAUU | NM_006504 |
| 6175 | PTPRE | GGAGAAAUAACGAUUGAGA | NM_006504 |
| 6176 | PTPRE | GGUCAAAUAAUAUCCCAUA | NM_006504 |
| 6177 | PTPRE | GGUCAAGAAUACACAGACU | NM_006504 |
| 6178 | PTPRE | CAUCAGUAUACGAGACUUU | NM_130435 |
| 6179 | PTPRE | GGUUCAGGAAGCAGAGGAA | NM_130435 |
| 6180 | PTPRE | AUGAAGAAGGCCAGGGUCA | NM_006504 |
| 6181 | PTPRE | GGAGAGAGAGCAGGAUAAA | NM_006504 |
| 6182 | PTPRF | GCAUAAUUCUUGAUGGUAA | NM_130440 |
| 6183 | PTPRP | GAGGAGAAGUCCCGGGUAA | NM_002840 |
| 6184 | PTPRF | GUGCCAAGCUACAGGAGAA | NM_130440 |
| 6185 | PTPRF | CCAUGGAGCUCGAGUUCAA | NM_002840 |
| 6186 | PTPRF | GGAGAUGGGCAGGGAGAAA | NM_002840 |
| 6187 | PTPRF | UCAGCUAAAUGCAGGGAAA | NM_002840 |
| 6188 | PTPRP | GAUAGAGAGCAGUGAGGAA | NM_130440 |
| 6189 | PTPRF | CCAACUACAUCGAUGGCUA | NM_002840 |
| 6190 | PTPRF | UGACACGGCUGGAGGAGAA | NM_002840 |
| 6191 | PTPRF | CCUUUAAGAUUCUGUACAA | NM_130440 |
| 6192 | PTPRF | GUGAGGAGUUCGAGAAGGA | NM_002840 |
| 6193 | PTPRF | AGACAGAGGACCAGUAUCA | NM_130440 |
| 6194 | PTPRF | AGCUGAAGGUGGUGGAGAA | NM_002840 |
| 6195 | PTPRF | CGGCAGAGGACGAAGACCA | NM_130440 |
| 6196 | PTPRF | GGAGAAUGGUGUGGGAACA | NM_002840 |
| 6197 | PTPRF | ACGAAGACCAACAGCACAA | NM_130440 |
| 6198 | PTPRF | CAGAAGGCCUACAUAGCUA | NM_130440 |
| 6199 | PTPRF | CCAAGACAGGCGAGGGAUU | NM_002840 |
| 6200 | PTPRF | UCUAGAAGCCAUCGAGCAA | NM_002840 |
| 6201 | PTPRF | CCGGAGAUGCUGUGGGUGA | NM_130440 |
| 6202 | PTPRF | ACGAGAAGACGGUGGACAU | NM_002840 |
| 6203 | PTPRF | CAGCAGUUCACGUGGGAGA | NM_002840 |
| 6204 | PTPRF | CGGAUGAGAUCGUGGUCCA | NM_002840 |
| 6205 | PTPRF | GGAUGAAGCACGAGAAGAC | NM_002840 |
| 6206 | PTPRF | CAGCAAAGGCUCUGGCCCA | NM_130440 |
| 6207 | PTPRF | CCAUGGACCAGAAGCGCUA | NM_002840 |
| 6208 | PTPRF | CUGGAGAAGUGGACGGAGU | NM_002840 |
| 6209 | PTPRF | UCACCGACCUGGCGGACAA | NM_130440 |
| 6210 | PTPRF | CCGAGGAACUGGAGCUGGA | NM_130440 |
| 6211 | PTPRF | AGAAGACGGUGGACAUCUA | NM_002840 |
| 6212 | PTPRG | CAAACUAUGUUGAUGGUUA | NM_002841 |
| 6213 | PTPRG | GCGAAAUAGUGGAGUGGAU | NM_002841 |
| 6214 | PTPRG | CAGAGAACAGUGAGGAAUA | NM_002841 |
| 6215 | PTPRG | CCACAUACUACGAAAGAUU | NM_002841 |
| 6216 | PTPRG | GUGGAGUAUCUGAGAAAUA | NM_002841 |
| 6217 | PTPRG | GAAGAUUUCUGGAGGAUGA | NM_002841 |
| 6218 | PTPRG | CGGUGGAGUAUCUGAGAAA | NM_002841 |
| 6219 | PTPRG | GCUAAUACCACUCGAAUAU | NM_002841 |
| 6220 | PTPRG | GCAAGAACUUAUUCAACAA | NM_002841 |
| 6221 | PTPRG | GGAAAGACACGACUGGAAA | NM_002841 |
| 6222 | PTPRG | CAGUUAACGUCCUGGGAUU | NM_002841 |
| 6223 | PTPRG | AAAUAAAGUCCAAGGGCUU | NM_002841 |
| 6224 | PTPRG | GAACAUCACUGCAGAGCAU | NM_002841 |
| 6225 | PTPRG | GAGAAGGAGAAGACGUUUA | NM_002841 |
| 6226 | PTPRG | GGACCAAGAAUGAGGACGA | NM_002841 |
| 6227 | PTPRG | GAACAUCCCUUAUUAGUUA | NM_002841 |
| 6228 | PTPRG | GCACUAAAGAAAAUGGAAA | NM_002841 |
| 6229 | PTPRG | GGGAAGAAUACCAGGAACU | NM_002841 |
| 6230 | PTPRG | GAACCGUGUUGGUGGAUUU | NM_002841 |
| 6231 | PTPRG | UUACGAACCUUGUGGAAAA | NM_002841 |
| 6232 | PTPRG | CCAAGAAUGAGGACGAGAA | NM_002841 |
| 6233 | PTPRG | GCGACUACAUUAAUGCAAA | NM_002841 |
| 6234 | PTPRG | GCUCAGAAAGAGUGUAACA | NM_002841 |
| 6235 | PTPRG | GGAAAAGACUCUAAGCACA | NM_002841 |
| 6236 | PTPRG | UCAGAAAGAGUGUAACAAA | NM_002841 |
| 6237 | PTPRG | AGGAGAGAAGGAUGAGAAA | NM_002841 |
| 6238 | PTPRG | ACAGAAGCCUCUAAAGUUU | NM_002841 |
| 6239 | PTPRG | AGGAGAAGACGUUUACAAA | NM_002841 |
| 6240 | PTPRG | GGAAUGAAAGGAACAGAUU | NM_002841 |
| 6241 | PTPRG | AGGAAGGAGAGAAGGAUGA | NM_002841 |
| 6242 | PTPRH | GGAGAAAGACGGAGUAAAU | NM_002842 |
| 6243 | PTPRH | GUAAGGAAGAUGAGAGAGA | NM_002842 |
| 6244 | PTPRH | GGGUGAAGUGUGAGCAUUA | NM_002842 |
| 6245 | PTPRH | CCAAGAACCGCUACAGAAA | NM_002842 |
| 6246 | PTPRH | GUGAGGAAGUGAUGGAGAA | NM_002842 |
| 6247 | PTPRH | AGGAAGAAUGAGAGGGACA | NM_002842 |
| 6248 | PTPRH | UCACAGAUCUCCAGAAUGA | NM_002842 |
| 6249 | PTPRH | AGAAUGAAACUCAGACUAA | NM_002842 |
| 6250 | PTPRH | CCAAAUCAGUCUUCUAUAA | NM_002842 |
| 6251 | PTPRH | GAAUGAAGGUCGUGUCUCA | NM_002842 |
| 6252 | PTPRH | CUGUGUGGGUGGAGAAAGA | NM_002842 |
| 6253 | PTPRH | GGUCAUUGCCGGAGCCUUU | NM_002842 |
| 6254 | PTPRH | GCCCAUACCCUCAGGACUA | NM_002842 |
| 6255 | PTPRH | CCGUGUGGGCAGAGAGGAA | NM_002842 |
| 6256 | PTPRH | GAGUGGAGGCUCAGACCAA | NM_002842 |
| 6257 | PTPRH | CUGAAGAGGAGGAAUAAGA | NM_002842 |
| 6258 | PTPRH | GGUCACAGAUCUCCAGAAU | NM_002842 |
| 6259 | PTPRH | AGAAUGAGAGGGACAGCAA | NM_002842 |
| 6260 | PTPRH | GGAAAGAAUGGAAUCAACA | NM_002842 |
| 6261 | PTPRH | GGAAUAAGAAGAAGCAGCA | NM_002842 |
| 6262 | PTPRH | CUCCCAACCCAGUGAGAAA | NM_002842 |
| 6263 | PTPRH | GAAUGAGGUCAGAGGCUAU | NM_002842 |
| 6264 | PTPRH | GGAAUGAGGUCAGAGGCUA | NM_002842 |
| 6265 | PTPRH | ACAGAAAUGUGCUGCCCUA | NM_002842 |
| 6266 | PTPRH | CCACAGAACUCGACCUACU | NM_002842 |
| 6267 | PTPRH | CGUAUGAGGAUGUCGAAAA | NM_002842 |
| 6268 | PTPRH | GUAAAUAGCUCCUCGUGGA | NM_002842 |
| 6269 | PTPRH | CAGUGGAGGCUCAGACCAA | NM_002842 |
| 6270 | PTPRH | UGACAUCACCCUAAAGGAA | NM_002842 |
| 6271 | PTPRH | CGUUGAUGGUGCAGACUGA | NM_002842 |
| 6272 | PTPRH | GGAAAGAUGCAAAGAAUAA | NM_002843 |
| 6273 | PTPRH | CUGCAGAUGUCCUGAAAUA | NM_002843 |
| 6274 | PTPRH | GAGGAAAGAUGCAAAGAAU | NM_002843 |
| 6275 | PTPRH | CCUCAUAAGAACAGAAGAA | NM_002843 |
| 6276 | PTPRH | GGAAAGAAUCGCUAUAAUA | NM_002843 |
| 6277 | PTPRJ | CAAAUAAGACAAAGGGAGA | NM_002843 |
| 6278 | PTPRJ | GCGUAUGGUUUGGGAGAAA | NM_002843 |
| 6279 | PTPRJ | GAACCAAAUGUGAGGAGUA | NM_002843 |
| 6280 | PTPRJ | ACUCAAGACUUCAGGUCAA | NM_002843 |
| 6281 | PTPRJ | UGAAAUUGACGUUGGGAAU | NM_002843 |
| 6282 | PTPRJ | GGUCAAGUUCAGUGGAUUU | NM_002843 |
| 6283 | PTPRJ | CCAUAGAGUUCAGGACAAA | NM_002843 |
| 6284 | PTPRJ | AGGAAAGAUGCAAAGAAUA | NM_002843 |
| 6285 | PTPRJ | UAAUCAGAGUGGAGAAUUU | NM_002843 |
| 6286 | PTPRJ | CAACGAUAGUUUAAGAACA | NM_002843 |
| 6287 | PTPRJ | CUUUAAUGGUGCAGACAGA | NM_002843 |
| 6288 | PTPRJ | GUAAAGCAUAAGAUGGAAA | NM_002843 |
| 6289 | PTPRJ | AGGAAUAGGCAAUGAGACU | NM_002843 |
| 6290 | PTPRJ | CAGCAGAAUCCUUUCAUAA | NM_002843 |
| 6291 | PTPRJ | GGCAAUGACAUCAGAAAUU | NM_002843 |
| 6292 | PTPRJ | GCCAUAGAGUUCAGGACAA | NM_002843 |
| 6293 | PTPRJ | UGGAGAAUUUUGAGGCCUA | NM_002843 |
| 6294 | PTPRJ | GAAAUAACCACCAACCAAA | NM_002843 |
| 6295 | PTPRJ | GAACACAACUGCAAUGACA | NM_002843 |
| 6296 | PTPRJ | UUUAAGAACACCUGAACAA | NM_002843 |
| 6297 | PTPRJ | UGAGAAUAGAGGAAAGAAU | NM_002843 |
| 6298 | PTPRJ | CAUCAUACACAGUGGAGAU | NM_002843 |
| 6299 | PTPRJ | GAACGGAAGUCACGUAUUU | NM_002843 |
| 6300 | PTPRJ | GAUCAGCAGUACAGCAGAA | NM_002843 |
| 6301 | PTPRJ | CCAAGCAGGCUCAGGACUA | NM_002843 |
| 6302 | PTPRK | CAACAUAACUUUAGUCCAA | NM_002844 |
| 6303 | PTPRK | GGAGAUUAGUGUAUGAUUA | NM_002844 |
| 6304 | PTPRK | GCCAAAGACUCAAGUGUAA | NM_002844 |
| 6305 | PTPRK | GAAUAGACUCCCAGACUAA | NM_002844 |
| 6306 | PTPRK | GUAAAGACACUGAGGAACA | NM_002844 |
| 6307 | PTPRK | UGUACAUGCUUGUGAAUUA | NM_002844 |
| 6308 | PTPRK | ACGAAAUGGAGAAGAUAUA | NM_002844 |
| 6309 | PTPRK | GGUAAUAUUUGAAGCUGAA | NM_002844 |
| 6310 | PTPRK | GAACAUAGCCUUUAAGCAU | NM_002844 |
| 6311 | PTPRK | CCACUAAUCACCAGAACAA | NM_002844 |
| 6312 | PTPRK | GAGACGAAAUGGAGAAGAU | NM_002844 |
| 6313 | PTPRK | GAAGGAGAGUGAAGAGACA | NM_002844 |
| 6314 | PTPRK | CAAUAUGAGAUCAGCUAUA | NM_002844 |
| 6315 | PTPRK | GCAAUUGGGUCUUUUAAUA | NM_002844 |
| 6316 | PTPRK | GGAGAAAGCACAUUAUAUU | NM_002844 |
| 6317 | PTPRK | CAUCAAUCAUAGAAGGUUU | NM_002844 |
| 6318 | PTPRK | CCAACUAUAUUGAUGGCUA | NM_002844 |
| 6319 | PTPRK | GGGAAUACCCGGCAGGAGA | NM_002844 |
| 6320 | PTPRK | GUGCAUUGCCACAGGGAGA | NM_002844 |
| 6321 | PTPRK | CAAAGUAACGUGUGUAGAA | NM_002844 |
| 6322 | PTPRK | AGGAAGGGAUGCUACGAUA | NM_002844 |
| 6323 | PTPRK | GAGAUCAGCUAUAGCAGUA | NM_002844 |
| 6324 | PTPRK | CUACAAUGAAGGAGAACGA | NM_002844 |
| 6325 | PTPRK | GCAAAGAUGCCAUGGGGAA | NM_002844 |
| 6326 | PTPRK | GCUUGAAACUUCUCCCAAA | NM_002844 |
| 6327 | PTPRK | CCAAUGAAUAUCAGGUAAU | NM_002844 |
| 6328 | PTPRK | GAAUGUAUGUCUUGUUCAA | NM_002844 |
| 6329 | PTPRK | ACAUCCAAGUACUGAGUUA | NM_002844 |
| 6330 | PTPRK | CCAGAGACGAAAUGGAGAA | NM_002844 |
| 6331 | PTPRK | CAAUGAAAUCCGUGAAGUU | NM_002844 |
| 6332 | PTPRM | UGAAGGAGGUGUUGGAAUA | NM_002845 |
| 6333 | PTPRM | GCAAUUAUAUCGAUGGUUA | NM_002845 |
| 6334 | PTPRM | CCUAAUAGAAACAGAACUA | NM_002845 |
| 6335 | PTPRM | CCACAGUACUGGCCAGAAA | NM_002845 |
| 6336 | PTPRM | ACAAGUGGCAAGAGGAAUA | NM_002845 |
| 6337 | PTPRM | GGACAAGUGGCAAGAGGAA | NM_002845 |
| 6338 | PTPRM | GGACAUGGCCGAAAGGGAA | NM_002845 |
| 6339 | PTPRM | CAAUAGAAGGAGACACAAA | NM_002845 |
| 6340 | PTPRM | GGAGACUGGUCCUGGAUUA | NM_002845 |
| 6341 | PTPRM | GUGAAGACACUGAGGAACA | NM_002845 |
| 6342 | PTPRM | UAGAAGUAGUGGAGGUCAA | NM_002845 |
| 6343 | PTPRM | GAAUAUAUCUGGAGACCCA | NM_002845 |
| 6344 | PTPRM | CAGAUGACACAGAGAUAUA | NM_002845 |
| 6345 | PTPRM | AGAACAAGUGCGAGAAGAA | NM_002845 |
| 6346 | PTPRM | ACUCAAUGGACAAGAGCUA | NM_002845 |
| 6347 | PTPRM | AAAUAGUUGUUGAGGAAGA | NM_002845 |
| 6348 | PTPRM | GAAGAAGUAAGCUGGGAUA | NM_002845 |
| 6349 | PTPRM | GGAAGAACGUCCUCGAAGA | NM_002845 |
| 6350 | PTPRM | AAACAGAACUACUGGCAGA | NM_002845 |
| 6351 | PTPRM | AUGCAGAGUUGGUAGUUAA | NM_002845 |
| 6352 | PTPRM | CAGAAAUCUUAAAGUGCUA | NM_002845 |
| 6353 | PTPRM | GGAUACAGCUCAACGCCAA | NM_002845 |
| 6354 | PTPRM | GGUGAAUGCCUCUGGGAGA | NM_002845 |
| 6355 | PTPRM | GCCAAGAAGCGGAAAGAGA | NM_002845 |
| 6356 | PTPRM | AGUGAUAACUUCUGGACAU | NM_002845 |
| 6357 | PTPRM | GGAAAGUACCGCUGCAUGA | NM_002845 |
| 6358 | PTPRM | GGACAUCAUCAGCAGGAUA | NM_002845 |
| 6359 | PTPRM | CACCAAUGUCAGUGUGAAA | NM_002845 |
| 6360 | PTPRM | CUACUUUGCUGCAGAAUUU | NM_002845 |
| 6361 | PTPRM | CAGACAAACUCAAGCCAGA | NM_002845 |
| 6362 | PTPRN | UGGCAUACAUGGAGGAUCA | NM_002846 |
| 6363 | PTPRN | GCCCAAGGGUGCAGGAAGA | NM_002846 |
| 6364 | PTPRN | GAAUAAAGUUAGUGUGUUG | NM_002846 |
| 6365 | PTPRN | GAGUGAAGCUGCUGGAGAU | NM_002846 |
| 6366 | PTPRN | GCCCAGCAGCAGAGGAAUA | NM_002846 |
| 6367 | PTPRN | GAAGAGUCAGGAAGGGAAA | NM_002846 |
| 6368 | PTPRN | CCACGAAGUCCUUGUUCAA | NM_002846 |
| 6369 | PTPRN | GCAGCCAGGAGGAGAGG˜ | NM_002846 |
| 6370 | PTPRN | GGAAGGUGAACAAGUGCUA | NM_002846 |
| 6371 | PTPRN | CAAAAGGAGUGAAGGAGAU | NM_002846 |
| 6372 | PTPRN | GACACAUGAUUCUGGCAUA | NM_002846 |
| 6373 | PTPRN | GCUCUAAGGACCAGUUUGA | NM_002846 |
| 6374 | PTPRN | GGUGAAGUCUGAACUGGAA | NM_002846 |
| 6375 | P1PRN | GUGAAUAAAGUUAGUGUGU | NM_002846 |
| 6376 | PTPRN | GACAGGGCUCCAAAUCUU | NM_002846 |
| 6377 | PTPRN | GGACAUGGGUAGCAAUUCU | NM_002846 |
| 6378 | PTPRN | GCACAGACAGGGCUCCAAA | NM_002846 |
| 6379 | PTPRN | GAAAGGACAUGGGUAGCAA | NM_002846 |
| 6380 | PTPRN | GAGUGAAGGAGAUUGACAU | NM_002846 |
| 6381 | PTPRN | CAAGGGUGCAGGAAGAAAU | NM_002846 |
| 6382 | PTPRN | GGAGUGAAGGAGAUUGACA | NM_002846 |
| 6383 | PTPRN | CUAAGGACCAGUUUGAAUU | NM_002846 |
| 6384 | PTPRN | UCUAAGGACCAGUUUGAAU | NM_002846 |
| 6385 | PTPRN | GCAGGGCUGGUGAAGUC | NM_002846 |
| 6386 | PTPRN | UGGAGCUGAUAUCAAGAM | NM_002846 |
| 6387 | PTPRN | GGAGGCAGCUGCAGUCCUU | NM_002846 |
| 6388 | PTPRN | GGAAAGGACAUGGGUAGCA | NM_002846 |
| 6389 | PTPRN | GGAAGUCUGUAUUCAGGAU | NM_002846 |
| 6390 | PTPRN | GCAGGAAGGUGAACAAGUG | NM_002846 |
| 6391 | PTPRN | GCACCUACAUCCUCAUCGA | NM_002846 |
| 6392 | PTPRN2 | CCUUAUGUUUGAAGAGAAA | NM_002847 |
| 6393 | PTPRN2 | CAAAGGUGCUAAAGAGAUU | NM_130842 |
| 6394 | PTPRN2 | GGUGUGAGAUAUACAAAUA | NM_130843 |
| 6395 | PTPRN2 | UGAAGAACCUGCAGACCAA | NM_130843 |
| 6396 | PTPRN2 | CCACGGAUGUUGUCAGGAA | NM_130842 |
| 6397 | PTPRN2 | AAGACAAACUGGAGGAAAC | NM_130843 |
| 6398 | PTPRN2 | GGAAACCUCUGGACUGAAA | NM_130843 |
| 6399 | PTPRN2 | UGGAGAACGUCAAGAGCCA | NM_130842 |
| 6400 | PTPRN2 | UGGCAGAUGGUGUGGGAGA | NM_002847 |
| 6401 | PTPRN2 | GCGUCUGGAUGGAGUGUUU | NM_130842 |
| 6402 | PTPRN2 | GGGAGGAGAACGUGCCCAA | NM_002847 |
| 6403 | PTPRN2 | GGGAAUCGGUUCAUCAAUU | NM_002847 |
| 6404 | PTPRN2 | GGACAGUGGUGUGGACAGA | NM_002847 |
| 6405 | PTPRN2 | ACAAGAACCGGCUGGAGAA | NM_002847 |
| 6406 | PTPRN2 | CCACAACCAGGAAGAACAA | NM_002847 |
| 6407 | PTPRN2 | AAAGAGAGAUUUGUGGAAA | NM_130842 |
| 6408 | PTPRN2 | AGGACCACCUGAAGAACAA | NM_002847 |
| 6409 | PTPRN2 | GCAGUGACCUUCAAAGUGA | NM_002847 |
| 6410 | PTPRN2 | GCACCUACGUCCUGAUCGA | NM_002847 |
| 6411 | PTPRN2 | GCCAGAAGGUUCCGGCAAU | NM_002847 |
| 6412 | PTPRN2 | GGGCCGUUCUUGUCCAAUA | NM_002847 |
| 6413 | PTPRN2 | GUAGAGAUGAUUCGGAUUU | NM_130843 |
| 6414 | PTPRN2 | GUCAAGAGCCAGACGUAUU | NM_002847 |
| 6415 | PTPRN2 | GUGCUAAAGAGAUUGAUAU | NM_130843 |
| 6416 | PTPRN2 | GAACAAAUCUGGGCAUUGA | NM_002847 |
| 6417 | PTPRN2 | AGACGAAGGAGCAGUUUGA | NM_002847 |
| 6418 | PTPRN2 | UGAAGGACCUGCAGAGGCA | NM_002847 |
| 6419 | PTPRN2 | AGCACAGGCUGAAGGAGAA | NM_130842 |
| 6420 | PTPRN2 | CCGAGAGCAUCCUGACCUA | NM_002847 |
| 6421 | PTPRN2 | CCGGCAUGGUCCAGACGAA | NM_002847 |
| 6422 | PTPRO | GAGCAGUGGUGGAGCAAUA | NM_030670 |
| 6423 | PTPRO | AAAGAAAGACAGAGACAAA | NM_030671 |
| 6424 | PTPRO | GGACAAUGCUAUAUAAAGA | NM_002848 |
| 6425 | PTPRO | GGUAAAGACUUCCGGACAA | NM_030667 |
| 6426 | PTPRO | CCUCAUUAUUCUUAGGAAA | NM_002848 |
| 6427 | PTPRO | GGAGAUGAUUUCAGAGGAA | NM_030669 |
| 6428 | PTPRO | CAAUGGAGCAGGAAGGAUA | NM_030670 |
| 6429 | PTPRO | CCACAGGAAUAAAGGAUUU | NM_002848 |
| 6430 | PTPRO | CAACAAAAGUCUCAGAUUA | NM_002848 |
| 6431 | PTPRO | CCUUAGAGAGGGAUGGAAA | NM_002848 |
| 6432 | PTPRO | CCAUACAACUGGAGUAAAA | NM_030668 |
| 6433 | PTPRO | CCAAAGAGCUGGGAAUUUA | NM_030671 |
| 6434 | PTPRO | GAAGAGAACUUUACUGAAU | NM_002848 |
| 6435 | PTPRO | CUAGAUAUCUUGUGCAAAU | NM_030670 |
| 6436 | PTPRO | GGAAAUCACUUCUGUGGAA | NM_030667 |
| 6437 | PTPRO | CCAAAGACUCUGACUAUAA | NM_030666 |
| 6438 | PTPRO | GGAAGAUGGUCCUGCAACA | NM_030667 |
| 6439 | PTPRO | UGAAGAAGCACAUGAAUUU | NM_030667 |
| 6440 | PTPRO | GAAAAUACGUGGUUGAAAU | NM_030667 |
| 6441 | PTPRO | AGACAGAGACAAACAAAUU | NM_030671 |
| 6442 | PTPRO | GGGAAGACUUAGCCUUAAA | NM_030671 |
| 6443 | PTPRO | ACAAUAGAGUCUCAGGAUA | NM_030671 |
| 6444 | PTPRO | ACACAAACAUCCUACCAUA | NM_030668 |
| 6445 | P1PRO | GAGUGUAACUAGUAACAUU | NM_030668 |
| 6446 | PTPRO | CGGAAGAACCUAUAGCCUA | NM_030668 |
| 6447 | PTPRO | GAAUUGAGCUGCUGUGACA | NM_030667 |
| 6448 | PTPRO | ACACAUGGUCCGACAGCAA | NM_030668 |
| 6449 | PTPRO | CAACUGAUGUGGAUGAAGA | NM_030668 |
| 6450 | PTPRO | UCAAAUGUCUCUAUGGAUU | NM_030669 |
| 6451 | PTPRO | UGAAGGAACCUGGGAAAUA | NM_002848 |
| 6452 | PTPRR | GGAAAUGUGUCUUGAUAAU | NM_130846 |
| 6453 | PTPRR | GACAAGACAAAGAGAAA | NM_130846 |
| 6454 | PTPRR | GUAAACAAGCUGAACAUAA | NM_002849 |
| 6455 | PTPRR | AGAGAGGGAUAUAUGGAAA | NM_130846 |
| 6456 | PTPRR | CAAAGUGAAUUCAUGGAAA | NM_002849 |
| 6457 | PTPRR | GCAAUUAAUCAGAAGAAGA | NM_002849 |
| 6458 | PTPRR | GCUGAGGGAUGUUUAGAAA | NM_130846 |
| 6459 | PTPRR | UGGCAUGGAUUGUGGAAGA | NM_002849 |
| 6460 | PTPRR | CAUAGGACUUCAAGAGAGA | NM_002849 |
| 6461 | PTPRR | GCUGAAAGAAGAAGGAGUU | NM_130846 |
| 6462 | PTPRR | GUGCUAUACUGGCCGGAAA | NM_002849 |
| 6463 | PTPRR | CAGCACUGUCCGAGGCAAA | NM_002849 |
| 6464 | PTPRR | GAGCAAAGAAGGAUUUUAU | NM_002849 |
| 6465 | PTPRR | GCACCUACAUUAAUGCUAA | NM_002849 |
| 6466 | PTPRR | GGAUGUAGAAGAAGACAGA | NM_002849 |
| 6467 | PTPRR | CCUUAAGACAAGACAAAGA | NM_130846 |
| 6468 | PTPRR | CUGCAUAGGAGACUAAAUA | NM_130846 |
| 6469 | PTPRR | GGUUAUCAGUGUAAAUGAA | NM_002849 |
| 6470 | PTPRR | GCUGAAGACAUUCGUAUUA | NM_130846 |
| 6471 | PTPRR | AGGAGUGGCUGCAGCUUUA | NM_002849 |
| 6472 | PTPRR | CCCAACAUGUGAAGCAUUA | NM_130846 |
| 6473 | PTPRR | GCACUACACUGAAUGGAAU | NM_130846 |
| 6474 | PTPRR | UGGAAAUACCAAUGAACUU | NM_130846 |
| 6475 | PTPRR | CCUCAUGGCCUGAUCACAA | NM_130846 |
| 6476 | PTPRR | CUACAGUGGCAAGGAGAAA | NM_130846 |
| 6477 | PTPRR | CUGCUAAAGUUGCAAGUGA | NM_002849 |
| 6478 | PTPRR | GGAAAGAAGAACAGUAUUG | NM_002849 |
| 6479 | PTPRR | UCACAAGACUCCAGACAGU | NM_130846 |
| 6480 | PTPRR | AGAAGAGGGUCCAACGUAU | NM_002849 |
| 6481 | PTPRR | GCAAUGGAAGGAAGGAGAA | NM_002849 |
| 6482 | PTPRS | AGAACAAACCCGACAGUAA | NM_002850 |
| 6483 | PTPRS | CCAAAUGCCUCCUGAACAA | NM_130853 |
| 6484 | PTPRS | GAUUGAAAGCAGUGAGGAA | NM_002850 |
| 6485 | PTPRS | CCAAGGACCCUGUGGAAAU | NM_002850 |
| 6486 | PTPRS | CCUACAAGAUCCAGUACAA | NM_130855 |
| 6487 | PTPRS | GAACAAACCCGACAGUAAA | NM_002850 |
| 6488 | PTPRS | AAGAAUGGCUCCAGUGAGA | NM_130853 |
| 6489 | PTPRS | CGGAACAGGGUGUGCCAAA | NM_130855 |
| 6490 | PTPRS | GAGGAGAAGUCACGGAUCA | NM_002850 |
| 6491 | PTPRS | UCAAAGAACCCAAGGACCA | NM_002850 |
| 6492 | PTPRS | AGACAGAGGAUGAGUACCA | NM_130855 |
| 6493 | PTPRS | CCCAAGAACUUCAAGGUGA | NM_130854 |
| 6494 | PTPRS | GCCAAGUGCAUAAGACUAA | NM_130853 |
| 6495 | PTPRS | GGACAUUCUCUCUGCACAA | NM_002850 |
| 6496 | PTPRS | GAAUGGCUCCAGUGAGAAA | NM_130853 |
| 6497 | PTPRS | GCAACUGGCAGAAGCACAA | NM_130855 |
| 6498 | PTPRS | CGGCCAUGGUGCAGACAGA | NM_130853 |
| 6499 | PTPRS | AGGAAACCGACCAGGGCAA | NM_130855 |
| 6500 | PTPRS | GCAAGAAGGUCAACUCUCA | NM_130855 |
| 6501 | PTPRS | CCUGGAACAAGAAGGGCAA | NM_002850 |
| 6502 | PTPRS | CGAGUGACCUGGAACAAGA | NM_130855 |
| 6503 | PTPRS | GCAUCGUGCUGGAGCGGAU | NM_130853 |
| 6504 | PTPRS | GGAUCAAGCCAGAGAAGAC | NM_130855 |
| 6505 | PTPRS | UGACGCGGCUGGAGGAGAA | NM_002850 |
| 6506 | PTPRS | CGGAUGACACGGCCGAAUA | NM_002850 |
| 6507 | PTPRS | AUGAAGGUCUCCUGGAUUU | NM_130855 |
| 6508 | PTPRS | CGAAGAACCGCUAUGCCAA | NM_130855 |
| 6509 | PTPRS | AAGAAGGGCAAGAAGGUCA | NM_130853 |
| 6510 | PTPRS | AUGAAGGCGUGGUGGACAU | NM_130854 |
| 6511 | PTPRS | GAGCAAUGGACGCAUCAAA | NM_002850 |
| 6512 | PTPRT | GGAUAAAGCUCAAAGCAAA | NM_007050 |
| 6513 | PTPRT | GCGCAGAAUUUCAGAUAUA | NM_007050 |
| 6514 | PTPRT | AGGAAGAAAUUGAGGCUUA | NM_007050 |
| 6515 | PTPRT | CCAGAGACAUUGAAGGAAA | NM_007050 |
| 6516 | PTPRT | ACAAUUAAUUCCUGGGUAA | NM_007050 |
| 6517 | PTPRT | GCACGUAUGAGAAGAGAAA | NM_007050 |
| 6518 | PTPRT | CCAUGGAGCUUUAGAGAGA | NM_007050 |
| 6519 | PTPRT | CAGAGAAGCAGGUGGACAA | NM_007050 |
| 6520 | PTPRT | CCAACUACAUUGACGGAUA | NM_007050 |
| 6521 | PTPRT | CAGACAAACUCCAGCCAAA | NM_007050 |
| 6522 | PTPRT | GGGUGAAAUGUGUGCGAUA | NM_007050 |
| 6523 | PTPRT | CUAAAUAGCUUCAGGAUGU | NM_007050 |
| 6524 | PTPRT | UCACAAACCUGGUGGAAGU | NM_007050 |
| 6525 | PTPRT | GCAAACAACAGUAAGCUUA | NM_007050 |
| 6526 | PTPRT | GGAGAAAGGGUCAUAGGAA | NM_133170 |
| 6527 | PTPRT | GGAAGUGCCUCAAAGCAAA | NM_133170 |
| 6528 | PTPRT | GUUAUAGGCUCAAGAUCAA | NM_133170 |
| 6529 | PTPRT | GCCAAGAAGCAGAAGGAGA | NM_133170 |
| 6530 | PTPRT | GGAAGAGACAAACAAGAUA | NM_007050 |
| 6531 | PTPRT | GUAUGUACCUCUAAGACAA | NM_133170 |
| 6532 | PTPRT | GAAGAGACAAACAAGAUAA | NM_133170 |
| 6533 | PTPRT | GAAGAGACAAGCUGAGAUU | NM_007050 |
| 6534 | PTPRT | GCAAGGAAGUAAUGAGAAG | NM_007050 |
| 6535 | PTPRT | ACACGGAGGUCUACGGAGA | NM_007050 |
| 6536 | PTPRT | CAUGAUAAGAAUCGAAGUA | NM_007050 |
| 6537 | PTPRT | GUGCAUUGCUGGUGGGAAG | NM_133170 |
| 6538 | PTPRT | GAGCAGGACUCUUGGAUGU | NM_007050 |
| 6539 | PTPRT | CAGCCAAAUCAAAGAUGAA | NM_007050 |
| 6540 | PTPRT | CAUCAAAAGGAGAAGAAAU | NM_133170 |
| 6541 | PTPRT | GGGCUGACCUGUAGGAUGU | NM_007050 |
| 6542 | PTPRU | CUACAUAGAUAUUCGGAUA | NM_133177 |
| 6543 | PTPRU | CCACAAAGAAGAAAGACAA | NM_133178 |
| 6544 | PTPRU | CCAACUACAUAGAUGGUUA | NM_005704 |
| 6545 | PTPRU | GCAUUGAUCCUCAGAGUAA | NM_005704 |
| 6546 | PTPRU | AGAAGAAAGACAAGGUCAA | NM_005704 |
| 6547 | PTPRU | UGAAGACGGCCGAGGGUUA | NM_133177 |
| 6548 | PTPRU | AGAUAUGACUACUGACCUA | NM_005704 |
| 6549 | PTPRU | GCAUGUGGGUAGAGGAUGU | NM_133177 |
| 6550 | PTPRU | GGUCAUACCCUCUGGAGUU | NM_005704 |
| 6551 | PTPRU | GGACUUGGCAUUUAGGAUU | NM_133177 |
| 6552 | PTPRU | UCAUGGAGGUGGAGUUUAU | NM_005704 |
| 6553 | PTPRU | CCAAGGAGGAGCUUAGCAA | NM_005704 |
| 6554 | PTPRU | GCAAAGAGGGCAAGGAGGU | NM_005704 |
| 6555 | PTPRU | GCAAAGGGAGAGACCACUA | NM_005704 |
| 6556 | PTPRU | GAGAAGACACACAUGAUGA | NM_133178 |
| 6557 | PTPRU | GAGAGUGUGUGAAGACAGA | NM_133177 |
| 6558 | PTPRU | GCCACAAAGAAGAAAGACA | NM_005704 |
| 6559 | PTPRU | GCAAAGGGAAGCCGGUGAA | NM_133177 |
| 6560 | PTPRU | GGGCAGUGCUGUGUGGAAU | NM_005704 |
| 6561 | PTPRU | UCAAGAACCUGCUGCCCUA | NM_133177 |
| 6562 | PTPRU | CAUUAAUGCCAACUACAUA | NM_133177 |
| 6563 | PTPRU | CCGUCAGCCUGCAGACCUA | NM_133177 |
| 6564 | PTPRU | GGGAAGGUCUCUUUAAAAU | NM_133177 |
| 6565 | PTPRU | GUGAGGGCGUCGUGGACAU | NM_133177 |
| 6566 | PTPRU | CCAAAUGCGCAGAGCCCAU | NM_005704 |
| 6567 | PTPRU | UGGGCGACGUGGAGGUCAA | NM_005704 |
| 6568 | PTPRU | AAAGCUGCCUGCAAGGAAA | NM_133178 |
| 6569 | PTPRU | GCUAUAUCGUCCUGGAUGU | NM_133178 |
| 6570 | PTPRU | AAGAAGAAAGACAAGGUCA | NM_133178 |
| 6571 | PTPRU | AGUGGGAGCAAGUGCGAAU | NM_005704 |
| 6572 | PTPRZ1 | AAACAAAGCUAGAGAAACA | NM_002851 |
| 6573 | PTPRZ1 | GCACAAGAAUCGAUACAUA | NM_002851 |
| 6574 | PTPRZ1 | UAACAAACCUCGUGGAGAA | NM_002851 |
| 6575 | PTPRZ1 | AGGAGGAGGAAGAGGGAAA | NM_002851 |
| 6576 | PTPRZ1 | GAACAUAUCCCAAGGGUAU | NM_002851 |
| 6577 | PTPRZ1 | AAACAAUUUUCGAGAGCAA | NM_002851 |
| 6578 | PTPRZ1 | AAGCAAUGCAACAGGGAAA | NM_002851 |
| 6579 | PTPRZ1 | CAGCAUUGCCUGAUGGAAA | NM_002851 |
| 6580 | PTPRZ1 | GCACAAGGCAGGAAGAGAA | NM_002851 |
| 6581 | PTPRZ1 | GUUUAAAGCAAGCAAGAUA | NM_002851 |
| 6582 | PTPRZ1 | GGGAAAAGACAUUGAAGAA | NM_002851 |
| 6583 | PTPRZ1 | CCAAUUAUGUUGAUGGCUA | NM_002851 |
| 6584 | PTPRZ1 | GGUUGGAAUCCGAGAAGAA | NM_002851 |
| 6585 | PTPRZ1 | GGAAAACAGUGGAAAUUAA | NM_002851 |
| 6586 | PTPRZ1 | GGAAAGACCUCGAGUCGUU | NM_002851 |
| 6587 | PTPRZ1 | GGGCAAGGUACCUCAGAUA | NM_002851 |
| 6588 | PTPRZ1 | AGAAAGUGGAUCAGGGCAA | NM_002851 |
| 6589 | PTPRZ1 | AGGCUGACCCAGAGAAUUA | NM_002851 |
| 6590 | PTPRZ1 | CGAAAUACAAUGAAGCCAA | NM_002851 |
| 6591 | PTPRZ1 | CGAAGGAACUGUCAACAUA | NM_002851 |
| 6592 | PTPRZ1 | CGACAUGCCUACUGAUAAU | NM_002851 |
| 6593 | PTPRZ1 | ACAAUGAAGCCAAGACUAA | NM_002851 |
| 6594 | PTPRZ1 | GAGUUAUGUUCUUCAGAUA | NM_002851 |
| 6595 | PTPRZ1 | AGGAAAAGGUAAUGAAUGA | NM_002851 |
| 6596 | PTPRZ1 | AGGAAGCAGUCAAAGGAAA | NM_002851 |
| 6597 | PTPRZ1 | GAGCUGUACUGUUGACUUA | NM_002851 |
| 6598 | PtPRZ1 | GGAAAGAAAUAUCCAACAU | NM_002851 |
| 6599 | PTPRZ1 | AGAAAUAACUCCUGGAUUC | NM_002851 |
| 6600 | PTPRZ1 | CCUAAGUCUUCGUUAAUAA | NM_002851 |
| 6601 | PTPRZ1 | GAGAAAGGAAGGAGAAAAU | NM_002851 |
| 6602 | RNGTT | GAAAGAACUCUGAGAAUUA | NM_003800 |
| 6603 | RNGTT | CUAAAGAGCCUAAAGGUUA | NM_003800 |
| 6604 | RNGTT | GUGUAUAGAACGAGAAAUU | NM_003800 |
| 6605 | RNGTT | UCAAAUGAGUUACGUGAAA | NM_003800 |
| 6606 | RNGTT | GAAAGCUACUUGAAGGAAA | NM_003800 |
| 6607 | RNGTT | CUGAAUAUCUGACGGGAUU | NM_003800 |
| 6608 | RNGTT | GCCUGUGACUUGAGGGUUA | NM_003800 |
| 6609 | RNGTT | GGAACUAAAUAUCAAGGAA | NM_003800 |
| 6610 | RNGTT | AAGGUAAUGUCAUGGAAUA | NM_003800 |
| 6611 | RNGTT | AUACAAAGUAAGCUGGAAA | NM_003800 |
| 6612 | RNGTT | GAGACAGAGAACAGACAAA | NM_003800 |
| 6613 | RNGTT | GGAAGGUGUUACUGUUAAA | NM_003800 |
| 6614 | RNGTT | CGUUGGAGAUUGUGAUUUU | NM_003800 |
| 6615 | RNGTT | CUAAUUGGUUUGUGAAAGA | NM_003800 |
| 6616 | RNGTT | GCAUAUCUGUGUAAGUAUA | NM_003800 |
| 6617 | RNGTT | CAGCUAACUUCUUUGAUUA | NM_003800 |
| 6618 | RNGTT | CGAGAUGAUUAUUGACAGA | NM_003800 |
| 6619 | RNGTT | GGACAUUCCUUUUCCAAUU | NM_003800 |
| 6620 | RNGTT | UAAAGAGCCUAAAGGUUAA | NM_003800 |
| 6621 | RNGTT | UAGGAGAGGUACAGCAGAA | NM_003800 |
| 6622 | RNGTT | CAUAAUACCAUCUGCAGUA | NM_003800 |
| 6623 | RNGTT | UCAAGGAAAUCAAGACAUU | NM_003800 |
| 6624 | RNGTT | CAAAAGAGCUGAAACAGUA | NM_003800 |
| 6625 | RNGTT | CCUAAAGAGCCUAAAGGUU | NM_003800 |
| 6626 | RNGTT | GAGGAUGGAAAGAAGGAAU | NM_003800 |
| 6627 | RNGTT | AGGUGUAACUCAAGUAACA | NM_003800 |
| 6628 | RNGTT | UGUUGGAGGUUAUGAAAGA | NM_003800 |
| 6629 | RNGTT | GGUCUGAAUUGUAUAUGUA | NM_003800 |
| 6630 | RNGTT | AAUGGGAGGAGAAGGGUUA | NM_003800 |
| 6631 | RNGTT | GGACAUGGUGAGUGCCCUA | NM_003800 |
| 6632 | RWDD2 | GCGUGGAGACAGAAGGAAA | NM_033411 |
| 6633 | RWDD2 | GAACAGAAAGCUUGUAUAU | NM_033411 |
| 6634 | RWDD2 | CAGCAGGACCUAAGGAAAA | NM_033411 |
| 6635 | RWDD2 | GGAUUUUGCAUGACAGGAA | NM_033411 |
| 6636 | RWDD2 | CAGAAAGCUUGUAUAUGAA | NM_033411 |
| 6637 | RWDD2 | AAGCAAAAGUUCAGACUCA | NM_033411 |
| 6638 | RWDD2 | AGACAGAAGGAAAUGGUGA | NM_033411 |
| 6639 | RWDD2 | GGACAACAGUGCAUCUUAU | NM_033411 |
| 6640 | RWDD2 | UGACUAUGGAUUAAGGAAU | NM_033411 |
| 6641 | RWDD2 | CGUGGAGACAGAAGGAAAU | NM_033411 |
| 6642 | RWDD2 | AUGUAAAUGCCCUGACGAA | NM_033411 |
| 6643 | RWDD2 | UAACCAAGGAGAAGUAAAA | NM_033411 |
| 6644 | SAC2 | GGAAGAAACUUGAGAGGAA | NM_014937 |
| 6645 | SAC2 | CCUGAGGAGUUGAGGGUUA | NM_014937 |
| 6646 | SAC2 | UUGAAGAACUUGUGGUUAA | NM_014937 |
| 6647 | SAC2 | ACACAGGAGUGAUGGAUAA | NM_014937 |
| 6648 | SAC2 | GGACAUGUCUUCAGAUAAU | NM_014937 |
| 6649 | SAC2 | GGACAGAAGUGAAAAGGAA | NM_014937 |
| 6650 | SAC2 | GAAUGAAGUUUGAGAAUGU | NM_014937 |
| 6651 | SAC2 | GUAAAGAGAAGGAGAAGUU | NM_014937 |
| 6652 | SAC2 | CUGAAGACCUUUACGCAUA | NM_014937 |
| 6653 | SAC2 | CCAAUUAUGUGGAGACUGA | NM_014937 |
| 6654 | SAC2 | GGAUAUAACCUGAACCUUU | NM_014937 |
| 6655 | SAC2 | GCAGGAAGAGAGAAGAUUA | NM_014937 |
| 6656 | SAC2 | GAUGUGGACUUUUGGAUUA | NM_014937 |
| 6657 | SAC2 | GGAGAUUACUUGAAGAGUU | NM_014937 |
| 6658 | SAC2 | GCACUUUGCUUAUUUGAAA | NM_014937 |
| 6659 | SAC2 | CAAAGAAGCGAGUGGCUAU | NM_014937 |
| 6660 | SAC2 | CAUAUUGGCUACUGGAAAU | NM_014937 |
| 6661 | SAC2 | CAUGAGGUCUGUAAAGUUA | NM_014937 |
| 6662 | SAC2 | UAGCAGGAGUUAUGAAAGA | NM_014937 |
| 6663 | SAC2 | GAACAUGAAGCUUUGCAUA | NM_014937 |
| 6664 | SAC2 | AUGGAAAUGUUGCCAAUUA | NM_014937 |
| 6665 | SAC2 | GAUAUUACCUCAACCGAUU | NM_014937 |
| 6666 | SAC2 | UCUCUUAGCAGCACAGAUA | NM_014937 |
| 6667 | SAC2 | CUGAGUAGCUUAUACACUA | NM_014937 |
| 6668 | SAC2 | CAGGUUGGGUAUCGAUAUA | NM_014937 |
| 6669 | SAC2 | GCAGUAAACCUCACGAAGA | NM_014937 |
| 6670 | SAC2 | GGUAAUAUGUAAGCAGGAA | NM_014937 |
| 6671 | SAC2 | GACCAAAUCCAAUGUAAAU | NM_014937 |
| 6672 | SAC2 | GCUAGGAAACUUUACCAAA | NM_014937 |
| 6673 | SAC2 | GCAGCUAGCUAACUCAUUA | NM_014937 |
| 6674 | SAG | CAGAGAAGACCGUGAAGAA | NM_000541 |
| 6675 | SAG | UCUGAAAGAUGCAGGAGAA | NM_000541 |
| 6676 | SAG | GGAAGAGAGACAAGAAUGA | NM_000541 |
| 6677 | SAG | GAUUAAAGCAUUCGUGGAA | NM_000541 |
| 6678 | SAG | GUGAAGAAGAUUAAAGCAU | NM_000541 |
| 6679 | SAG | GAGAAGACCGUGAAGAAGA | NM_000541 |
| 6680 | SAG | GGAAAGAAAGUGUAUGUCA | NM_000541 |
| 6681 | SAG | GGGACAAAUCGGUGACCAU | NM_000541 |
| 6682 | SAG | GGUCAAAGCAUUCGCCACA | NM_000541 |
| 6683 | SAG | GAAUGACGCUGAUGAGUGA | NM_000541 |
| 6684 | SAG | GAGCAAAGCCCCACAGUUU | NM_000541 |
| 6685 | SAG | UCGAGAAAGGAGAGGCAUU | NM_000541 |
| 6686 | SAG | AAGAAGAUCUCCCGGGACA | NM_000541 |
| 6687 | SAG | CUGGCUAACAAUCGAGAAA | NM_000541 |
| 6688 | SAG | UGGGAAUCCUGGUGUCUUA | NM_000541 |
| 6689 | SAG | CUGAUCUUGUGAAGGGAAA | NM_000541 |
| 6690 | SAG | UUAAAGCAUUCGUGGAACA | NM_000541 |
| 6691 | SAG | GUUUAGUCCUUUGGAGUUA | NM_000541 |
| 6692 | SAG | GGAACAGAGACUACAUAGA | NM_000541 |
| 6693 | SAG | AGACCGUGAAGAAGAUUAA | NM_000541 |
| 6694 | SAG | GUUCUCUACUCGAGUGAUU | NM_000541 |
| 6695 | SAG | GAAGAAGAUUAAAGCAUUC | NM_000541 |
| 6696 | SAG | AGAAGAGCUCCGUGCGAUU | NM_000541 |
| 6697 | SAG | UGUCAGGCUUUCUGGGAGA | NM_000541 |
| 6698 | SAG | GAAAGAUGCAGGAGAAGCU | NM_000541 |
| 6699 | SAG | GAGGAGGGGAAGAGAGACA | NM_000541 |
| 6700 | SAG | GCUCACAGUGUCAGGCUUU | NM_000541 |
| 6701 | SAG | GGAGUUUGCUCGCCAUAAU | NM_000541 |
| 6702 | SAG | UAACAAUCGAGAAAGGAGA | NM_000541 |
| 6703 | SAG | UCGUGGAACAGGUGGCCAA | NM_000541 |
| 6704 | SBF1 | GGAAAAUGCUUGAGGCCAA | NM_002972 |
| 6705 | SBF1 | CCACAGAGAGGGAGGAAGA | NM_002972 |
| 6706 | SBF1 | GGGACAAAGCCCAGCUCAA | NM_002972 |
| 6707 | SBF1 | GCAGUGUGGCCGAGAGCUA | NM_002972 |
| 6708 | SBF1 | GCGCCGAGCUCUUCCGUAA | NM_002972 |
| 6709 | SBF1 | CGACCAGAGUAGUGGCUCA | NM_002972 |
| 6710 | SBP1 | GGCUGGAGGUUGUGCGCAA | NM_002972 |
| 6711 | SBF1 | UGAAGGUGCUGGAGGGCAU | NM_002972 |
| 6712 | SBF1 | AGAAGGACUGGGAGGACAA | NM_002972 |
| 6713 | SBF1 | AGCAGGAGCUGGUGCAGAA | NM_002972 |
| 6714 | SBF1 | GCUGAGCGCUGGAAGGACA | NM_002972 |
| 6715 | SBF1 | UGGAGAACGUGAUUGGGAA | NM_002972 |
| 6716 | SBF1 | GAGAAGGACUGGGAGGACA | NM_002972 |
| 6717 | SBF1 | GCUGAAAGCAUGUGUCCCA | NM_002972 |
| 6718 | SBF1 | CCUACGUGUUUGAGGGGAA | NM_002972 |
| 6719 | SBF1 | CUGCAGAGUCAGACGCACA | NM_002972 |
| 6720 | SBF1 | GCUGGUUCGUGCUGGACAA | NM_002972 |
| 6721 | SBF1 | UGACCAAGGAGAAGCGCAU | NM_002972 |
| 6722 | SBF1 | UCGAUGAGCUGGUGGCCCA | NM_002972 |
| 6723 | SBF1 | CUACGGACCUGUUCGAUGA | NM_002972 |
| 6724 | SBF1 | GGAAGAACGGUCUGAUGGA | NM_002972 |
| 6725 | SBF1 | CUAAGACUGUGGACGAGAA | NM_002972 |
| 6726 | SBF1 | UGCAGAGGCUGGAGACAGA | NM_002972 |
| 6727 | SBF1 | AGAAGUACCUGCAGGCUGU | NM_002972 |
| 6728 | SBF1 | CUGAGGACCAGGAGGAGGA | NM_002972 |
| 6729 | SBF1 | GCUCAAGGGUGUGCGGUCA | NM_002972 |
| 6730 | SBF1 | CAGCAGAGAGUGAGAACAG | NM_002972 |
| 6731 | SBF1 | GUCAAGAACGCCAAGAAGA | NM_002972 |
| 6732 | SBP1 | CUGGAGGCCUGCAUGGCAA | NM_002972 |
| 6733 | SBF1 | GCUGGUGCCCAUUGAGGUA | NM_002972 |
| 6734 | SSH1 | GCACAGAAGUGGUAAUAAA | NM_018984 |
| 6735 | SSH1 | CGAAGAAGAUCGAAAAUUA | NM_018984 |
| 6736 | SSH1 | GGAAGAACGUGCACACAUA | NM_018984 |
| 6737 | SSH1 | GUGAGAAGGAUGUGAAGAA | NM_018984 |
| 6738 | SSH1 | UGAAGGAACUCAAGGAAUU | NM_018984 |
| 6739 | SSH1 | UAAACAAAGCGAAGAGGAA | NM_018984 |
| 6740 | SSH1 | CGGAGAACCUAAACAACAA | NM_018984 |
| 6741 | SSH1 | CUCCAAACCAUCAGGGAAA | NM_018984 |
| 6742 | SSH1 | AGAAGGAUGUGAAGAAGAA | NM_018984 |
| 6743 | SSH1 | CCAAAGAGCUAGAGCGGCU | NM_018984 |
| 6744 | SSH1 | GCAGCGAAGAAGAUCGAAA | NM_018984 |
| 6745 | SSH1 | CGGAAGACCUGUCCAGUGA | NM_018984 |
| 6746 | SSH1 | GCAAACAGCGGCACAACAA | NM_018984 |
| 6747 | SSH1 | GGAAGGAUGCACAUAUUUA | NM_018984 |
| 6748 | SSH1 | CAAAGAGAUUCGUAAUGAA | NM_018984 |
| 6749 | SSH1 | GAGGAGGAGAAGAAACUAA | NM_018984 |
| 6750 | SSH1 | CAAGAAGAACCAUGUUUUA | NM_018984 |
| 6751 | SSH1 | CCACAAGCAUGCAGGUGAU | NM_018984 |
| 6752 | SSH1 | GAGAAGGAUGUGAAGAAGA | NM_018984 |
| 6753 | SSH1 | CCAACGGCAUGGAGGAUGA | NM_018984 |
| 6754 | SSH1 | CCACUGGAAUGAAGCGUAU | NM_018984 |
| 6755 | SSH1 | GAGAAGAAACUAACCAACA | NM_018984 |
| 6756 | SSH1 | CGGAGUUCCAGCAGCGAUA | NM_018984 |
| 6757 | SSH1 | GAGCCAGGAUCUAGAAAAU | NM_018984 |
| 6758 | SSH1 | CUAAACAACAACAGCAAGA | NM_018984 |
| 6759 | SSH1 | UAACCAACAUGCAGCACAA | NM_018984 |
| 6760 | SSH1 | AAGCAGAAGCGCAGCAUCA | NM_018984 |
| 6761 | SSH1 | GAGAGGAGGAGAAGAAACU | NM_018984 |
| 6762 | SSH1 | UCAGAUGAGUAGUCCCAAA | NM_018984 |
| 6763 | SSH1 | GCCAGGACACCGAGGAGAA | NM_018984 |
| 6764 | SSH2 | GAGCAAAGGCAAAGGGAAA | NM_033389 |
| 6765 | SSH2 | GGGUAGAAAUCAUUGAAUA | NM_033389 |
| 6766 | SSH2 | GAAUGUCACUCGAGAGAUA | NM_033389 |
| 6767 | SSH2 | AGAAAUGAGCAAAGGCAAA | NM_033389 |
| 6768 | SSH2 | GAAUAUACCCACAUAGUUA | NM_033389 |
| 6769 | SSH2 | GAGUUUACUUCUAGGGAAU | NM_033389 |
| 6770 | SSH2 | UGAGAAGAGCGGAGAGCAA | NM_033389 |
| 6771 | SSH2 | GAAAGAAAGACGAACGGUA | NM_033389 |
| 6772 | SSH2 | AGAAGGAUUUGGAGAAUAU | NM_033389 |
| 6773 | SSH2 | AAAGAAAGACGAACGGUAA | NM_033389 |
| 6774 | SSH2 | GGAAAGUACUUACCAGAAU | NM_033389 |
| 6775 | SSH2 | GGAAAGUGAACAUGGAAAA | NM_033389 |
| 6776 | SSH2 | GAACUCAACAAGAAGGAUA | NM_033389 |
| 6777 | SSH2 | CUUCAAUGGAUGAGGAACA | NM_033389 |
| 6778 | SSH2 | GGAGACAGAUGCACUGAAA | NM_033389 |
| 6779 | SSH2 | GGAUAGCCCUACACAGAUA | NM_033389 |
| 6780 | SSH2 | UGGAAGAUUUGGAGACAGA | NM_033389 |
| 6781 | SSH2 | CGGUAUAUCUUGAAUGUCA | NM_033389 |
| 6782 | SSH2 | GAACAGAAAGGCUAAUUAA | NM_033389 |
| 6783 | SSH2 | GAACAGAGUUGGAAAUGCA | NM_033389 |
| 6784 | SSH2 | GGCUAGAACUCAACAAGAA | NM_033389 |
| 6785 | SSH2 | GGAGAAUAUUACAUCCAAA | NM_033389 |
| 6786 | SSH2 | GAACGAACAGAAAGGCUAA | NM_033389 |
| 6787 | SSH2 | GAACGUGAACGAACAGAAA | NM_033389 |
| 6788 | SSH2 | GGUCAAAUGGAUAGCCCUA | NM_033389 |
| 6759 | SSH2 | GGUGAAGGAGCGUGCUAAA | NM_033389 |
| 6790 | SSH2 | CCUAUGCAAUGAAGGAAUA | NM_033389 |
| 6791 | SSH2 | GCAGAAGGAUUUGGAGAAU | NM_033389 |
| 6792 | SSH2 | GAGCAAGGGCUGAGGAAAG | NM_033389 |
| 6793 | SSH2 | GCAGUAUGCCAAAGAAUUU | NM_033389 |
| 6794 | SSH-3 | GGACAAUGAUGAUGCAGUA | NM_018276 |
| 6795 | SSH-3 | UGGAGGAGCUGCAGAGGAA | NM_018276 |
| 6796 | SSH-3 | AGGAGAAGGUUGUAGGCAU | NM_017857 |
| 6797 | SSH-3 | GGGCAAAGCCGGAUCUUCA | NM_018276 |
| 6798 | SSH-3 | CCUCAGAACAGGAGCAGAU | NM_017857 |
| 6799 | SSH-3 | GCACCAAGCAUGUGAGGCA | NM_018276 |
| 6800 | SSH-3 | CAGCAAACCUGGAGGAGCU | NM_017857 |
| 6801 | SSH-3 | CUGCAGAGGAACAGGGUCA | NM_017857 |
| 6802 | SSH-3 | UUUCAUAGCCUUACAGUAU | NM_017857 |
| 6803 | SSH-3 | CCCGGAAGGUGGUGAGACA | NM_017857 |
| 6804 | SSH-3 | GGGCACCAGGCCAGAGAUA | NM_017857 |
| 6805 | SSH-3 | GGAGAAGGUUGUAGGCAUG | NM_017857 |
| 6806 | SSH-3 | GGGCCACACUCCAGGUAUU | NM_017857 |
| 6807 | SSH-3 | CCAGACAGACUUCGGGCAA | NM_018276 |
| 6808 | SSH-3 | CGUGACGUCUGGUGGGCAA | NM_018276 |
| 6809 | SSH-3 | GGCUUUGUACUGAGAAAUA | NM_017857 |
| 6810 | SSH-3 | GAAAGAAGAGCCUGGGCCA | NM_017857 |
| 6811 | SSH-3 | AGGUGUACUUAGAUGGAGA | NM_018276 |
| 6812 | SSH-3 | GCACCAGGCCAGAGAUAGU | NM_018276 |
| 6813 | SSH-3 | CCUUGGAGCUGGAGAGCAC | NM_017857 |
| 6814 | SSH-3 | UGUGGAAAGUGUUGGAUGU | NM_017857 |
| 6815 | SSH-3 | GUGACAUGCCAGAGGUCUU | NM_017857 |
| 6816 | SSH-3 | GCCAUGAAGCAGUACGAAU | NM_017857 |
| 6817 | SSH-3 | UCAGUGACCUGGAGAGUGU | NM_017857 |
| 6818 | SSH-3 | CCCAGAAGCAGGAGGAGCA | NM_017857 |
| 6819 | SSH-3 | UCCAAGGGCUCAAGACUUU | NM_018276 |
| 6820 | SSH-3 | CAGAACAGGAGCAGAUGGA | NM_017857 |
| 6821 | SSH-3 | CUGGAGAGOACCUCAGAGA | NM_017857 |
| 6822 | SSH-3 | GGAAGGAGACGCACCGCUU | NM_018276 |
| 6823 | SSH-3 | GAGGAGCUGCAGAGGAACA | NM_017857 |
| 6824 | STYX | GAAGAGAACACAUGAAGAA | NM_145251 |
| 6825 | STYX | GUACGAGGCUGGAAGAAAU | NM_145251 |
| 6826 | STYX | GUGGGAGAGUGGAGAUUAA | NM_145251 |
| 6827 | STYX | CAUCAUAGAGUGUGAAUUU | NM_145251 |
| 6828 | STYX | GGAAUGAAGUACAGAGAUG | NM_145251 |
| 6829 | STYX | CUACAGAAACAUGGAAUAA | NM_145251 |
| 6830 | STYX | GACGAGAGAUGCAGGAAAU | NM_145251 |
| 6831 | STYX | GUGCUUAAACACAAGGAUA | NM_145251 |
| 6832 | STYX | CCUCAUGGCCUCUAAAUUA | NM_145251 |
| 6833 | STYX | GCAACAUCAUAGAGUGUGA | NM_145251 |
| 6834 | STYX | GGAGAGUGGAGAUUAAUUA | NM_145251 |
| 6835 | STYX | GCUUACAAAUGGGAGGAAA | NM_145251 |
| 6836 | STYX | AGACGAGAGAUGCAGGAAA | NM_145251 |
| 6837 | STYX | AUGAAGAAGAGGAUGAUUU | NM_145251 |
| 6838 | STYX | CAGAGAUGCUUUUGCUUAU | NM_145251 |
| 6839 | STYX | ACUACAGAAACAUGGAAUA | NM_145251 |
| 6840 | STYX | AGGAAAAGUUCUUGUGCAU | NM_145251 |
| 6841 | STYX | CCAAGAGGUACUAUGCAAA | NM_145251 |
| 6842 | STYX | CUUACAAAUGGGAGGAAAA | NM_145251 |
| 6843 | STYX | GUGGGAGACUCUAGUGUAU | NM_145251 |
| 6844 | STYX | GGGAAUGAUUUCUGUAUGU | NM_145251 |
| 6845 | STYX | GGACUUGCAAAGAGGUAUU | NM_145251 |
| 6846 | STYX | GAGAGAUGCAGGAAAUUUU | NM_145251 |
| 6847 | STYX | CAAGGAUAGUGUUAGAUUU | NM_145251 |
| 6848 | STYX | CCUGGAUAUUGCAGAUAAU | NM_145251 |
| 6849 | STYX | CACAUGAAGAAGAGGAUGA | NM_145251 |
| 6850 | STYX | UCCAUCAACUUCAGGAAUA | NM_145251 |
| 6851 | STYX | CAGAUAAUCCAGUUGAAAA | NM_145251 |
| 6852 | STYX | UGAAGAAGAGGAUGAUUUU | NM_145251 |
| 6853 | STYX | GGGAGACUCUAGUGUAUUU | NM_145251 |
| 6854 | SYNJ1 | CCUAAAUGGUAAAGAGUUA | NM_003895 |
| 6855 | SYNJ1 | CAGCAUAGCUUUUAAGAAU | NM_003895 |
| 6856 | SYNJ1 | UGACAAAGCUCGAGCACUU | NM_003895 |
| 6857 | SYNJ1 | GGAACAACAAGGAAAGAUA | NM_003895 |
| 6858 | SYNJ1 | CCAAAGUACUGGAUGCAUA | NM_003895 |
| 6859 | SYNJ1 | GGAGAAUGGCGUUCAGUAA | NM_003895 |
| 6860 | SYNJ1 | GUUGGAAGCUCUUGGUUUA | NM_003895 |
| 6861 | SYNJ1 | GAAGAUAAAAUGUGGGUUA | NM_003895 |
| 6862 | SYNJ1 | CUAAAGUACUAAAGAGCAU | NM_003895 |
| 6863 | SYNJ1 | GAACAAAUGAUGAUGGUCA | NM_003895 |
| 6864 | SYNJ1 | CGAACAAACUGCUUGGAUU | NM_003895 |
| 6865 | SYNJ1 | CUAAAGAGCAUGUGUGAGA | NM_003895 |
| 6866 | SYNJ1 | GGACAAAUCCUUUCAGUGA | NM_003895 |
| 6867 | SYNJ1 | UCUUAUAGCAGGAGAUCAA | NM_203446 |
| 6868 | SYNJ1 | GAACUUAUAUGGUAGACAA | NM_003895 |
| 6869 | SYNJ1 | UGGAAGAAGAAAUGAGUUU | NM_003895 |
| 6870 | SYNJ1 | ACACUGGACUUUACAGAAA | NM_003895 |
| 6871 | SYNJ1 | CAAAGAUGCCAGAGUGGUA | NM_003895 |
| 6872 | SYNJ1 | CAUUAAAGAUUGACCCAUU | NM_003895 |
| 6873 | SYNJ1 | CCUGAAAGCCAAAGCAAAA | NM_203446 |
| 6874 | SYNJ1 | UUAAAGAGCUCAUAAGACA | NM_003895 |
| 6755 | SYNJ1 | AGGAAAUGGCCUUUUGAUA | NM_203446 |
| 6876 | SYNJ1 | GGAAACAUUGUGAGUGCAA | NM_003895 |
| 6877 | SYNJ1 | GUGCUGAAGUGGAGGAACU | NM_203446 |
| 6878 | SYNJ1 | AGAAGUAAGCCAACUGAUA | NM_003895 |
| 6879 | SYNJ1 | UCUUAUGUGUGGAGGAGUA | NM_203446 |
| 6880 | SYNJ1 | UCGAGGAAGAAGAGGAUUU | NM_003895 |
| 6881 | SYNJ1 | CCAGGAGUUUCAAGAUAAA | NM_203446 |
| 6882 | SYNJ1 | GAACAACAAGGAAAGAUAA | NM_003895 |
| 6883 | SYNJ1 | UCAGAAACGUCGAAAGGUU | NM_003895 |
| 6884 | SYNJ2 | CCACAGAGCUAGACAGAUA | NM_003898 |
| 6885 | SYNJ2 | GUGGGAAGCUAGAGAAAUU | NM_003898 |
| 6886 | SYNJ2 | ACGAGGAGUUUAAGAGUUA | NM_003898 |
| 6887 | SYNJ2 | AGACAGAGCAGAUGAUUUA | NM_003898 |
| 6888 | SYNJ2 | CUACAGAAAUCAAGUGGAA | NM_003898 |
| 6889 | SYNJ2 | CCUCAUAGCUUUGAAGAAA | NM_003898 |
| 6890 | SYNJ2 | UUGAAGAGAUGGUGGAAUU | NM_003898 |
| 6891 | SYNJ2 | GGAAUUGAGCGCAGGGAAU | NM_003898 |
| 6892 | SYNJ2 | ACCCUAAACUGUUGAAUAA | NM_003898 |
| 6893 | SYNJ2 | GGAAGAACAGUUUGAGCAA | NM_003898 |
| 6894 | SYNJ2 | CCUGAAGGUUGAUGUAUAA | NM_003898 |
| 6895 | SYNJ2 | GAAACAUCCCUUUGAUAAA | NM_003898 |
| 6896 | SYNJ2 | GCGAGGAGGUGGCAGACAA | NM_003898 |
| 6897 | SYNJ2 | UAAAUGGGACAGAGAAUAA | NM_003898 |
| 6898 | SYNJ2 | GUGCUGUGGUGGAGGAAGA | NM_003898 |
| 6899 | SYNJ2 | ACAGAAAUCAAGUGGAAAA | NM_003898 |
| 6900 | SYNJ2 | GCGGAGAGGAGGUGCUCAA | NM_003898 |
| 6901 | SYNJ2 | GGGUGAAGCAGGAGGCCAU | NM_003898 |
| 6902 | SYNJ2 | AAGAACAGUUUGAGCAACA | NM_003898 |
| 6903 | SYNJ2 | CCUGUUUGCUGGAGGAAAA | NM_003898 |
| 6904 | SYNJ2 | AGGAAGAGGCCAAGGAGGA | NM_003898 |
| 6905 | SYNJ2 | GUUAGAAUAUGGAGAGUGU | NM_003898 |
| 6906 | SYNJ2 | UCACAAAUUUCAAGCGGAU | NM_003898 |
| 6907 | SYNJ2 | AGACAGUGAUCUAGAUGUU | NM_003898 |
| 6908 | SYNJ2 | GCAGAGAGGCCAAGCCACA | NM_003898 |
| 6909 | SYNJ2 | CAGCAGUGAUCAAGUGUCA | NM_003898 |
| 6910 | SYNJ2 | AGAAACAUCCCUUUGAUAA | NM_003898 |
| 6911 | SYNJ2 | CCAACUUCGUGGAGACAGA | NM_003898 |
| 6912 | SYNJ2 | CCAAUGAGGUCCAAGAAGU | NM_003898 |
| 6913 | SYNJ2 | CAGAAGAGACAUCUAUUUA | NM_003898 |
| 6914 | TEM6 | GCACAAAGGAGGACGUGAA | NM_022748 |
| 6915 | TEM6 | CAAGAAAGCUGGAGAUUUG | NM_022748 |
| 6916 | TEM6 | GAAAUGAGAAGAAGGAACA | NM_022748 |
| 6917 | TEM6 | UGACAGACAAUCAGAGGAA | NM_022748 |
| 6918 | TEM6 | GGAGAAAUGAGAAGAAGGA | NM_022748 |
| 6919 | TEM6 | CAUCUAAGCCACUGAAUCA | NM_022748 |
| 6920 | TEM6 | CAGCAAAGAUGACCGUUUU | NM_022748 |
| 6921 | TEM6 | GAACAUCCCCAGAGUGAAA | NM_022748 |
| 6922 | TEM6 | CAAGUGUAUUUCAGGCUUA | NM_022748 |
| 6923 | TEM6 | CCAGAUAGUCCAGGUGAUA | NM_022748 |
| 6924 | TEM6 | GUGAUAAACUUGUGAUCGU | NM_022748 |
| 6925 | TEM6 | AAAGGGACAUGCAAGGAAA | NM_022748 |
| 6926 | TEM6 | GGGAAGAAUUGGCCACGUU | NM_022748 |
| 6927 | TENS1 | GGAUAUUUCAAGAGAACAA | NM_022748 |
| 6928 | TENS1 | GGAAGGAGGAUCUGGACAA | NM_022748 |
| 6929 | TENS1 | AGAUAGUCCAGGUGAUAAA | NM_022748 |
| 6930 | TENS1 | CCUCAGUGCAGAUGGAGAA | NM_022748 |
| 6931 | TENS1 | CAGCAACGUUGGUGAAGAU | NM_022748 |
| 6932 | TENS1 | GGAAAUGACUGAUGCUCGA | NM_022748 |
| 6933 | TENS1 | GCGGAUAUUUCAAGAGAAC | NM_022748 |
| 6934 | TENS1 | GAACAAGAAAGCUGGAGAU | NM_022748 |
| 6935 | TENS1 | GGUCCGAACACUUGUACAA | NM_022748 |
| 6936 | TENS1 | CAAAGGAGGACGUGAACCA | NM_022748 |
| 6937 | TENS1 | GGACAAUGCCAGCAAAGAU | NM_022748 |
| 6938 | TENS1 | GGGAAAGGCUGGUGUGGAC | NM_022748 |
| 6939 | TENS1 | UCGCCAUGUUGAAGGACAA | NM_022748 |
| 6940 | TENS1 | CAAGACAGGAAGUGGAUCA | NM_022748 |
| 6941 | TENS1 | GCGAAGGUGAGGAAGAAAA | NM_022748 |
| 6942 | TENS1 | AAUGCUACCACAAGAAAUA | NM_022748 |
| 6943 | TENS1 | CAGAAGGCCCUGAGCAUCA | NM_022748 |
| 6944 | TPIP | GAAACAACGCUGAGUGAAA | NM_130785 |
| 6945 | TPIP | GGAGAAAGGCGAACCAAUA | NM_130785 |
| 6946 | TPIP | GCAAUAAAUUUCAGGGAGU | NM_199255 |
| 6947 | TPIP | GAAUGAAAGUCCACAGACA | NM_130785 |
| 6948 | TPIP | CAUAAUAGGGUCAGUAGAA | NM_130785 |
| 6949 | TPIP | CUGGAGAACUGAUAAUAAA | NM_130785 |
| 6950 | TPIP | UGACAUUGAAACAGACAAA | NM_130785 |
| 6951 | TPIP | CCAAGUAGUAAUGGAGAAA | NM_199255 |
| 6952 | TPIP | AGAAUUUGCUGUGGAGAUA | NM_130785 |
| 6953 | TPIP | GUAGAAGGAUGGACACAUU | NM_130785 |
| 6954 | TPIP | AAUAAAACCCACAGCAAUA | NM_199254 |
| 6955 | TPIP | AUGAAAGUCCACAGACAAA | NM_130785 |
| 6956 | TPIP | CGAGGAGGCACCUGCGAAA | NM_130785 |
| 6957 | TPIP | GAGAAAGGCGAACCAAUAA | NM_130785 |
| 6958 | TPIP | UAAAGGAGGCAAAGGAAGA | NM_130785 |
| 6959 | TPIP | UAGAAAUCCMUUGAGGAA | NM_130785 |
| 6960 | TPIP | CAAUAAAUUUCAGGGAGUA | NM_130785 |
| 6961 | TPIP | CGAUAUUGCAUGACAUUGA | NM_130785 |
| 6962 | TPIP | UCACUGUAAAGGAGGCAAA | NM_199255 |
| 6963 | TPIP | CAGAAUUUGCUGUGGAGAU | NM_199254 |
| 6964 | TPIP | CAGAAACAACGCUGAGUGA | NM_130785 |
| 6965 | TPIP | CGAGGAAAGCCUAUAUUAU | NM_130785 |
| 6966 | TPIP | GAGGAAAGCCUAUAUUAUU | NM_130785 |
| 6967 | TPIP | UGAAAGAGCUUAUGAUCCU | NM_130785 |
| 6968 | TPIP | CCUGGAGAACUGAUAAUAA | NM_130785 |
| 6969 | TPIP | CUUCGAAUCUUCCUAAAUA | NM_130785 |
| 6970 | TPIP | GAAAUGACUUCCAAUGACA | NM_130785 |
| 6971 | TPTE | GGAGAAAGGCGAACAGAUA | NM_013315 |
| 6972 | TPTE | CCAAAUAGAAAUGGAGAAA | NM_013315 |
| 6973 | TPTE | GAUAAAACCCACAGCGAAA | NM_013315 |
| 6974 | TPTE | AGAAAGGCGAACAGAUAAA | NM_013315 |
| 6975 | TPTE | AGUCUGGUGUAUAGAGUUA | NM_013315 |
| 6976 | TPTE | GAGAAAGGCGAACAGAUAA | NM_013315 |
| 6977 | TPTE | GAAAUAUGUUCAACUGCAA | NM_013315 |
| 6978 | TPTE | AUAAUAGGGUCGUUAGAAU | NM_013315 |
| 6979 | TPTE | UCAUAUGACAGCAAGAUUA | NM_013315 |
| 6980 | TPTE | UGUAAAGGAGGCACAGAUA | NM_013315 |
| 6981 | TPTE | CUGAUAAGAAGGCGGGUUU | NM_199260 |
| 6982 | TPTE | CAAAGGAAAGCCUGUAUUA | NM_013315 |
| 6983 | TPTE | GAAUAUUCCCAGAUGGACA | NM_013315 |
| 6984 | TPTE | CAUAUGACAGCAAGAUUAA | NM_013315 |
| 6985 | TPTE | GAAAGAAAGCCCACACACA | NM_013315 |
| 6986 | TPTE | UAUCAGUGAAAGUGUGUUA | NM_013315 |
| 6987 | TPTE | UCAAGGAAGUUGUGCGGUU | NM_013315 |
| 6988 | TPTE | AGGAAAGCCUGUAUUAUUU | NM_013315 |
| 6989 | TPTE | GUGGAUGGCUCAAGAUCUU | NM_013315 |
| 6990 | TPTE | UAGAUAAGAAACACCGAAA | NM_013315 |
| 6991 | TPTE | UAAAGGAGGCACAGAUAGA | NM_013315 |
| 6992 | TPTE | UCUGUAUGAUGAUGUGAAA | NM_013315 |
| 6993 | TPTE | AGGAAGUAAAUGAGUGGAU | NM_199261 |
| 6994 | TPTE | CUUGAAAAGCUGAUAAGAA | NM_013315 |
| 6995 | TPTE | GAAAGGAGACAGCAGUAUU | NM_013315 |
| 6996 | TPTE | UGACAGCAAGAUUAAGAAA | NM_013315 |
| 6997 | TPTE | AAGGAAAGCCUGUAUUAUU | NM_013315 |
| 6998 | TPTE | GCACACAUCUUUUAUUGAA | NM_013315 |
| 6999 | TPTE | GUAUAGAGUUAUGGAUUCA | NM_013315 |
| 7000 | TPTE | UCACCAAGGAAGUAAAUGA | NM_013315 |
| 7001 | TRIO | GAUAAGAGGUACAGAGAUU | NM_007118 |
| 7002 | TRIO | GGAAUAUGAUCGAGGAACA | NM_007118 |
| 7003 | TRIO | CCAGAUAACUGCAAAGCAA | NM_007118 |
| 7004 | TRIO | GCUAUGUGGUUGAGGGCUA | NM_007118 |
| 7005 | TRIO | GCUGAUGGCUUUUGUGAAA | NM_007118 |
| 7006 | TRIO | GGAAGGAAAGGGAGAGAUU | NM_007118 |
| 7007 | TRIO | AAGGAAAGGGAGAGAUUAA | NM_007118 |
| 7008 | TRIO | UGAAGAAGAAGGUGAUUAA | NM_007118 |
| 7009 | TRIO | GCAUGGAAAUGGAGGGCAU | NM_007118 |
| 7010 | TRIO | UGGCAGAAACAGAGGACUA | NM_007118 |
| 7011 | TRIO | GUACAUAGCUUAUUGUCAA | NM_007118 |
| 7012 | TRIO | GCAGAAACGUCAUGAAGAU | NM_007118 |
| 7013 | TRIO | GAUACGUACCUGUGGGAAA | NM_007118 |
| 7014 | TRIO | AGAACAGGGUAUUGCAUUA | NM_007118 |
| 7015 | TRIO | GUAUGAACGUGUAUGUAAA | NM_007118 |
| 7016 | TRIO | GAGUGAAGCUAUUGAUACA | NM_007118 |
| 7017 | TRIO | UGAAAGAGCACGAGGAGUU | NM_007118 |
| 7018 | TRIO | UGAAGAAGCUGGCGCACAA | NM_007118 |
| 7019 | TRIO | CAGACAAGUUUCAGAUGUA | NM_007118 |
| 7020 | TRIO | CGACCUAUCCGUAGCAUUA | NM_007118 |
| 7021 | TRIO | CAGCGAACCACUUGAUAAA | NM_007118 |
| 7022 | TRIO | ACCUAAAGCCUGAGAAUAU | NM_007118 |
| 7023 | TRIO | CCAGCAUGCCAUUGAGAAA | NM_007118 |
| 7024 | TRIO | GUGCAGUCAUCGUGGAGAA | NM_007118 |
| 7025 | TRIO | CCGAAAAGUAUAUGAGCAA | NM_007118 |
| 7026 | TRIO | CGUCAGUGCAAUUGAGGAA | NM_007118 |
| 7027 | TRIO | UGAAGGAGGAUGAGAUCAA | NM_007118 |
| 7028 | TRIO | CUGAUGACAUGAAAGGAAA | NM_007118 |
| 7029 | TRIO | GCAAGCACCUGGAGCAGAA | NM_007118 |
| 7030 | TRIO | GCAAGGAUUCGACGGGAAA | NM_007118 |
| 7031 | ZFHX1B | CAUCAGAUUUUGAGGAAUA | NM_014795 |
| 7032 | ZFHX1B | CAGAAGAAAUGAAGGAAGA | NM_014795 |
| 7033 | ZFHX1B | CUGCAAGGCUGAAGAAAUU | NM_014795 |
| 7034 | ZFHX1B | GGACACAGGUUCUGAAACA | NM_014795 |
| 7035 | ZFHX1B | GGAAGAGGAAGAUGAAAUA | NM_014795 |
| 7036 | ZFHX1B | CAAAUAAUCUGGACAACAA | NM_014795 |
| 7037 | ZFHX1B | GGAGAAAGUACCAGCGGAA | NM_014795 |
| 7038 | ZFHX1B | CAAGAGAGGAAGAGGAAGA | NM_014795 |
| 7039 | ZFHX1B | AGAAGGAGCACGAGAAAGA | NM_014795 |
| 7040 | ZFHX1B | AGGAAGAGGAAGAUGAAAU | NM_014795 |
| 7041 | ZFHX1B | CUACAAUGCAUCAGUAUUA | NM_014795 |
| 7042 | ZFHX1B | AGGAAGAGGAAGAAAGUGA | NM_014795 |
| 7043 | ZFHX1B | GAAGAUGGCAUGUAAUAAA | NM_014795 |
| 7044 | ZFHX1B | GCACUUAGGUGUAGGGAUG | NM_014795 |
| 7045 | ZFHX1B | GCACAUCAGCAGCAAGAAA | NM_014795 |
| 7046 | ZFHX1B | CGAGAAGGAGCACGAGAAA | NM_014795 |
| 7047 | ZFHX1B | UGAAAGAACACCUGCGAAU | NM_014795 |
| 7048 | ZFHX1B | CGGAGGAGAGGGAGAGUAU | NM_014795 |
| 7049 | ZFHX1B | GAACAUUAAUUGUGAGAUG | NM_014795 |
| 7050 | ZFHX1B | GUGUCAGAUUUGUAAGAAA | NM_014795 |
| 7051 | ZFHX1B | CCACCGAGCUGCUGAUGAA | NM_014795 |
| 7052 | ZFHX1B | CCACAAAGAACAAAACAAA | NM_014795 |
| 7053 | ZFHX1B | GGGCUUACUUGCAGAGCAU | NM_014795 |
| 7054 | ZFHX1B | UGUAGAUGGUCCAGAAGAA | NM_014795 |
| 7055 | ZFHX1B | CGAGAAAGAAGGCGAGGAU | NM_014795 |
| 7056 | ZFHX1B | GCACAUGAAUCACAGGUAU | NM_014795 |
| 7057 | ZFHX1B | GGAGCUGGGUAUUGUUAAA | NM_014795 |
| 7058 | ZFHX1B | UGACAAGACAUUCCAGAAA | NM_014795 |
| 7059 | ZFHX1B | GAGACUAAUUCCUGUGUUU | NM_014795 |
| 7060 | ZFHX1B | CGAGAAGAAUGAAGAGAAC | NM_014795 |
| 7061 | ZNF367 | CUGGCGAGGUAUUGGGAAA | NM_153695 |
| 7062 | ZNF367 | CGUUGUAACAUCUGUAAUA | NM_153695 |
| 7063 | ZNF367 | AAUAAAUGAAGGAGAGCAU | NM_153695 |
| 7064 | ZNF367 | GAGCAUUCAUCCAGCAGAA | NM_153695 |
| 7065 | ZNF367 | AUGAAGAGGACGACGAGAA | NM_153695 |
| 7066 | ZNF367 | ACGCCAGGCUGAAGAGAGA | NM_153695 |
| 7067 | ZNF367 | GGUAUUGGGAAAUGAGAGA | NM_153695 |
| 7068 | ZNF367 | AGAAAUCGCUCCAGGCUCA | NM_153695 |
| 7069 | ZNF367 | UCUUCACACCGGAGAGAAA | NM_153695 |
| 7070 | ZNF367 | GCAGAUUCACCCAUGCAAA | NM_153695 |
| 7071 | ZNF367 | GAGGUGAGGACGAGGAGGA | NM_153695 |
| 7072 | ZNF367 | CAGCAGGACCCUCUGGAAU | NM_153695 |
| 7073 | ZNF367 | AGCAGGACCCUCUGGAAUA | NM_153695 |
| 7074 | ZNF367 | AGAUACUGUCCGCGAUUUA | NM_153695 |
| 7075 | ZNF367 | AAGGCAAGCUGGUUCAGAA | NM_153695 |
| 7076 | ZNF367 | GCACACAACGUGACGCUCA | NM_153695 |
| 7077 | ZNF367 | AGUCUGAUGAAGAGGACGA | NM_153695 |
| 7078 | ZNF367 | GCAGAUACUGUCCGCGAUU | NM_153695 |
| 7079 | ZNF367 | CCACGGACACACUCAGCAA | NM_153695 |
| 7080 | ZNF367 | AGAGAGGAGCCCACGGACA | NM_153695 |
| 7081 | ZNF367 | GGACACACUCAGCAAACAU | NM_153695 |
| 7082 | ZNF367 | GCUCACAAAAGGACUCAUA | NM_153695 |
| 7083 | ZNF367 | GAUGGAAUCCGACGUGGUA | NM_153695 |
| 7084 | ZNF367 | UCAGCGACUUCAUGGUGUA | NM_153695 |
| 7085 | ZNF367 | UCAUAGAGCUUGCCAACCU | NM_153695 |
| 7086 | ZNF367 | GCGAGGUAUUGGGAAAUGA | NM_153695 |
| 7087 | ZNF367 | CAUCUGUAAUAGGGUGUUU | NM_153695 |
| 7088 | ZNF367 | CAAAGUGGACAGCUCAAAA | NM_153695 |
| 7089 | ZNF367 | CAGAAUCCGUUGUAACAUC | NM_153695 |
| 7090 | ZNF367 | GAAGCGAGCAGCCCAGACA | NM_153695 |

[0443] Thus, consistent with Example XVII, the present invention provides an siRNA that targets a sequence for a phosphatase, wherein the siRNA is selected from the group consisting of SEQ. ID NOs. 438-7090.

[0444] In another embodiment, an siRNA is provided, said siRNA comprising a sense region and an antisense region, wherein said sense region and said antisense region are at least 90% complementary, said sense region and said antisense region together form a duplex region comprising 18-30 base pairs, and said sense region comprises a sequence that is at least 90% similar to a sequence selected from the group consisting of: SEQ. ID NOs 438-7090.

[0445] In another embodiment, an siRNA is provided wherein the siRNA comprises a sense region and an antisense region, wherein said sense region and said antisense region are at least 90% complementary, said sense region and said antisense region together form a duplex region comprising 18-30 base pairs, and said sense region comprises a sequence that is identical to a contiguous stretch of at least 18 bases of a sequence selected from the group consisting of: SEQ. ID NOs 438-7090.

[0446] In another embodiment, an siRNA is provided wherein the siRNA comprises a sense region and an antisense region, wherein said sense region and said antisense region are at least 90% complementary, said sense region and said antisense region together form a duplex region comprising 19-30 base pairs, and said sense region comprises a sequence that is identical to a contiguous stretch of at least 18 bases of a sequence selected from the group consisting of: SEQ. ID NOs 438-7090.

[0447] In another embodiment, a pool of at least two siRNAs is provided, wherein said pool comprises a first siRNA and a second siRNA, said first siRNA comprises a duplex region of length 18-30 base pairs that has a first sense region that is at least 90% similar to 18 bases of a first sequence selected from the group consisting of: SEQ. ID NOs 438-7090 and said second siRNA comprises a duplex region of length 18-30 base pairs that has a second sense region that is at least 90% similar to 18 bases of a second sequence selected from the group consisting of: SEQ. ID NOs 438-7090 and wherein said first sense region and said second sense region are not identical.

[0448] In another embodiment, a pool of at least two siRNAs is provided, wherein said pool comprises a first siRNA and a second siRNA, said first siRNA comprises a duplex region of length 18-30 base pairs that has a first sense region that is identical to at least 18 bases of a sequence selected from the group consisting of: SEQ. ID NOs 438-7090 and wherein the second siRNA comprises a second sense region that comprises a sequence that is identical to at least 18 bases of a sequence selected from the group consisting of: SEQ. ID NOs 438-7090.

[0449] In another embodiment, a pool of at least two siRNAs is provided, wherein said pool comprises a first siRNA and a second siRNA, said first siRNA comprises a duplex region of length 19-30 base pairs and has a first sense region comprising a sequence that is at least 90% similar to a sequence selected from the group consisting of: SEQ. ID NOs 438-7090, and said duplex of said second siRNA is 19-30 base pairs and comprises a second sense region that comprises a sequence that is at least 90% similar to a sequence selected from the group consisting of: SEQ. ID NOs 438-7090.

[0450] In another embodiment, a pool of at least two siRNAs is provided, wherein said pool comprises a first siRNA and a second siRNA, said first siRNA comprises a duplex region of length 19-30 base pairs and has a first sense region comprising a sequence that is identical to at least 18 bases of a sequence selected the group consisting of: SEQ. ID NOs 438-7090 and said duplex of said second siRNA is 19-30 base pairs and comprises a second sense region comprising a sequence that is identical to a sequence selected from the group consisting of: SEQ. ID NOs 438-7090.

[0451] In each of the aforementioned embodiments, preferably the antisense region is at least 90% complementary to a contiguous stretch of bases of one of the NCBI sequences identified in Example XVII; each of the recited NCBI sequences is incorporated by reference as if set forth fully herein. In some embodiments, the antisense region is 100% complementary to a contiguous stretch of bases of one of the NCBI sequences identified in Example XVII.

[0452] Further, in some embodiments that are directed to siRNA duplexes in which the antisense region is 20-30 bases in length, preferably there is a stretch of 19 bases that is at least 90%, more preferably 100% complementary to the recited sequence id number and the entire antisense region is at least 90% and more preferably 100% complementary to a contiguous stretch of bases of one of the NCBI sequences identified in Example XVII.

[0453] While the invention has been described in connection with specific embodiments thereof, it will be understood that it is capable of further modifications and this application is intended to cover any variations, uses, or adaptations of the invention following, in general, the principles of the invention and including such departure from the present disclosure as come within known or customary practice within the art to which the invention pertains and as may be applied to the essential features hereinbefore set forth and as follows in the scope of the appended claims.

The application's sequence listing, which the Patent Office published only in electronic form, follows.

SEQUENCE LISTING (7090 sequences)

SEQ ID NO: 1 - RNA, 19 nt, Artificial Sequence
  Synthetic
  misc_feature 1-2, 4, 6-9, 12, 15-18: n is any nucleotide
nnanannnnucnaannnna

SEQ ID NO: 2 - RNA, 19 nt, Artificial Sequence
  Synthetic
  misc_feature 1-2, 4, 6-9, 12, 15-18: n is any nucleotide
nnanannnnugnaannnna

SEQ ID NO: 3 - RNA, 19 nt, Artificial Sequence
  Synthetic
  misc_feature 1-2, 4, 6-9, 12, 15-18: n is any nucleotide
nnanannnnuunaannnna

SEQ ID NO: 4 - RNA, 19 nt, Artificial Sequence
  Synthetic
  misc_feature 1-2, 4, 6-9, 12, 15-18: n is any nucleotide
nnanannnnucncannnna

SEQ ID NO: 5 - RNA, 19 nt, Artificial Sequence
  Synthetic
  misc_feature 1-2, 4, 6-9, 12, 15-18: n is any nucleotide
nnanannnnugncannnna

SEQ ID NO: 6 - RNA, 19 nt, Artificial Sequence
  Synthetic
  misc_feature 1-2, 4, 6-9, 12, 15-18: n is any nucleotide
nnanannnnuuncannnna

SEQ ID NO: 7 - RNA, 19 nt, Artificial Sequence
  Synthetic
  misc_feature 1-2, 4, 6-9, 12, 15-18: n is any nucleotide
nnanannnnucnuannnna

SEQ ID NO: 8 - RNA, 19 nt, Artificial Sequence
  Synthetic
  misc_feature 1-2, 4, 6-9, 12, 15-18: n is any nucleotide
nnanannnnugnuannnna

SEQ ID NO: 9 - RNA, 19 nt, Artificial Sequence
  Synthetic
  misc_feature 1-2, 4, 6-9, 12, 15-18: n is any nucleotide
nnanannnnuunuannnna

SEQ ID NO: 10 - RNA, 19 nt, Artificial Sequence
  Synthetic
  misc_feature 1-2, 4, 6-9, 12, 15-18: n is any nucleotide
nnancnnnnucnaannnna

SEQ ID NO: 11 - RNA, 19 nt, Artificial Sequence
  Synthetic
  misc_feature 1-2, 4, 6-9, 12, 15-18: n is any nucleotide
nnancnnnnugnaannnna

SEQ ID NO: 12 - RNA, 19 nt, Artificial Sequence
  Synthetic
  misc_feature 1-2, 4, 6-9, 12, 15-18: n is any nucleotide
nnancnnnnuunaannnna

SEQ ID NO: 13 - RNA, 19 nt, Artificial Sequence
  Synthetic
  misc_feature 1-2, 4, 6-9, 12, 15-18: n is any nucleotide
nnancnnnnucncannnna

SEQ ID NO: 14 - RNA, 19 nt, Artificial Sequence
  Synthetic
  misc_feature 1-2, 4, 6-9, 12, 15-18: n is any nucleotide
nnancnnnnugncannnna

SEQ ID NO: 15 - RNA, 19 nt, Artificial Sequence
  Synthetic
  misc_feature 1-2, 4, 6-9, 12, 15-18: n is any nucleotide
nnancnnnnuuncannnna

SEQ ID NO: 16 - RNA, 19 nt, Artificial Sequence
  Synthetic
  misc_feature 1-2, 4, 6-9, 12, 15-18: n is any nucleotide
nnancnnnnucnuannnna

SEQ ID NO: 17 - RNA, 19 nt, Artificial Sequence
  Synthetic
  misc_feature 1-2, 4, 6-9, 12, 15-18: n is any nucleotide
nnancnnnnugnuannnna

SEQ ID NO: 18 - RNA, 19 nt, Artificial Sequence
  Synthetic
  misc_feature 1-2, 4, 6-9, 12, 15-18: n is any nucleotide
nnancnnnnuunuannnna

SEQ ID NO: 19 - RNA, 19 nt, Artificial Sequence
  Synthetic
  misc_feature 1-2, 4, 6-9, 12, 15-18: n is any nucleotide
nnangnnnnucnaannnna

SEQ ID NO: 20 - RNA, 19 nt, Artificial Sequence
  Synthetic
  misc_feature 1-2, 4, 6-9, 12, 15-18: n is any nucleotide
nnangnnnnugnaannnna

SEQ ID NO: 21 - RNA, 19 nt, Artificial Sequence
  Synthetic
  misc_feature 1-2, 4, 6-9, 12, 15-18: n is any nucleotide
nnangnnnnuunaannnna

SEQ ID NO: 22 - RNA, 19 nt, Artificial Sequence
  Synthetic
  misc_feature 1-2, 4, 6-9, 12, 15-18: n is any nucleotide
nnangnnnnucncannnna

SEQ ID NO: 23 - RNA, 19 nt, Artificial Sequence
  Synthetic
  misc_feature 1-2, 4, 6-9, 12, 15-18: n is any nucleotide
nnangnnnnugncannnna

SEQ ID NO: 24 - RNA, 19 nt, Artificial Sequence
  Synthetic
  misc_feature 1-2, 4, 6-9, 12, 15-18: n is any nucleotide
nnangnnnnuuncannnna

SEQ ID NO: 25 - RNA, 19 nt, Artificial Sequence
  Synthetic
  misc_feature 1-2, 4, 6-9, 12, 15-18: n is any nucleotide
nnangnnnnucnuannnna

SEQ ID NO: 26 - RNA, 19 nt, Artificial Sequence
  Synthetic
  misc_feature 1-2, 4, 6-9, 12, 15-18: n is any nucleotide
nnangnnnnugnuannnna

SEQ ID NO: 27 - RNA, 19 nt, Artificial Sequence
  Synthetic
  misc_feature 1-2, 4, 6-9, 12, 15-18: n is any nucleotide
nnangnnnnuunuannnna

SEQ ID NO: 28 - RNA, 22 nt, Artificial Sequence
  Synthetic
  misc_feature 4-5,7,9-12,15,18-21: n is any nucleotide
gucnnanannnnucnaannnna

SEQ ID NO: 29 - DNA, 208 bp, Homo sapiens
  misc_feature (1)...(208): human cyclophilin fragment
gttccaaaaacagtggataattttgtggccttagctacaggagagaaaggatttggctacaaaaacagcaaattccatcgtgtaatcaaggacttcatgatccagggcggagacttcaccaggggagatggcacaggaggaaagagcatctacggtgagcgcttccccgatgagaacttcaaactgaagcactacgggcctggctggg

SEQ ID NO: 30 - DNA, 200 bp, Photinus pyralis
  misc_feature (1)...(200): firefly luciferase fragment
tgaacttcccgccgccgttgttgttttggagcacggaaagacgatgacggaaaaagagatcgtggattacgtcgccagtcaagtaacaaccgcgaaaaagttgcgcggaggagttgtgtttgtggacgaagtaccgaaaggtcttaccggaaaactcgacgcaagaaaaatcagagagatcctcataaaggccaagaagg

SEQ ID NO: 31 - DNA, 108 bp, Homo sapiens
  misc_feature (1)...(108): human DBL fragment
acgggcaaggccaagtgggatgcctggaatgagctgaaagggacttccaaggaagatgccatgaaagcttacatcaacaaagtagaagagctaaagaaaaaatacggg

SEQ ID NO: 32 - RNA, 19 nt, Artificial Sequence
  Synthetic
guuccaaaaacaguggaua

SEQ ID NO: 33 - RNA, 19 nt, Artificial Sequence
  Synthetic
cccaaaaacaguggauaau

SEQ ID NO: 34 - RNA, 19 nt, Artificial Sequence
  Synthetic
caaaaacaguggauaauuu

SEQ ID NO: 35 - RNA, 19 nt, Artificial Sequence
  Synthetic
aaaacaguggauaauuuug

SEQ ID NO: 36 - RNA, 19 nt, Artificial Sequence
  Synthetic
aacaguggauaauuuugug

SEQ ID NO: 37 - RNA, 19 nt, Artificial Sequence
  Synthetic
caguggauaauuuuguggc

SEQ ID NO: 38 - RNA, 19 nt, Artificial Sequence
  Synthetic
guggauaauuuuguggccu

SEQ ID NO: 39 - RNA, 19 nt, Artificial Sequence
  Synthetic
ggauaauuuuguggccuua

SEQ ID NO: 40 - RNA, 19 nt, Artificial Sequence
  Synthetic
auaauuuuguggccuuagc

SEQ ID NO: 41 - RNA, 19 nt, Artificial Sequence
  Synthetic
aauuuuguggccuuagcua

SEQ ID NO: 42 - RNA, 19 nt, Artificial Sequence
  Synthetic
uuuuguggccuuagcuaca

SEQ ID NO: 43 - RNA, 19 nt, Artificial Sequence
  Synthetic
uuguggccuuagcuacagg

SEQ ID NO: 44 - RNA, 19 nt, Artificial Sequence
  Synthetic
guggccuuagcuacaggag

SEQ ID NO: 45 - RNA, 19 nt, Artificial Sequence
  Synthetic
ggccuuagcuacaggagag

SEQ ID NO: 46 - RNA, 19 nt, Artificial Sequence
  Synthetic
ccuuagcuacaggagagaa

SEQ ID NO: 47 - RNA, 19 nt, Artificial Sequence
  Synthetic
uuagcuacaggagagaaag

SEQ ID NO: 48 - RNA, 19 nt, Artificial Sequence
  Synthetic
agcuacaggagagaaagga

SEQ ID NO: 49 - RNA, 19 nt, Artificial Sequence
  Synthetic
cuacaggagagaaaggauu

SEQ ID NO: 50 - RNA, 19 nt, Artificial Sequence
  Synthetic
acaggagagaaaggauuug

SEQ ID NO: 51 - RNA, 19 nt, Artificial Sequence
  Synthetic
aggagagaaaggauuuggc

SEQ ID NO: 52 - RNA, 19 nt, Artificial Sequence
  Synthetic
gagagaaaggauuuggcua

SEQ ID NO: 53 - RNA, 19 nt, Artificial Sequence
  Synthetic
gagaaaggauuuggcuaca

SEQ ID NO: 54 - RNA, 19 nt, Artificial Sequence
  Synthetic
gaaaggauuuggcuacaaa

SEQ ID NO: 55 - RNA, 19 nt, Artificial Sequence
  Synthetic
aaggauuuggcuacaaaaa

SEQ ID NO: 56 - RNA, 19 nt, Artificial Sequence
  Synthetic
ggauuuggcuacaaaaaca

SEQ ID NO: 57 - RNA, 19 nt, Artificial Sequence
  Synthetic
auuuggcuacaaaaacagc

SEQ ID NO: 58 - RNA, 19 nt, Artificial Sequence
  Synthetic
uuggcuacaaaaacagcaa

SEQ ID NO: 59 - RNA, 19 nt, Artificial Sequence
  Synthetic
ggcuacaaaaacagcaaau

SEQ ID NO: 60 - RNA, 19 nt, Artificial Sequence
  Synthetic
cuacaaaaacagcaaauuc

SEQ ID NO: 61 - RNA, 19 nt, Artificial Sequence
  Synthetic
acaaaaacagcaaauucca

SEQ ID NO: 62 - RNA, 19 nt, Artificial Sequence
  Synthetic
aaaaacagcaaauuccauc

SEQ ID NO: 63 - RNA, 19 nt, Artificial Sequence
  Synthetic
aaacagcaaauuccaucgu

SEQ ID NO: 64 - RNA, 19 nt, Artificial Sequence
  Synthetic
acagcaaauuccaucgugu

SEQ ID NO: 65 - RNA, 19 nt, Artificial Sequence
  Synthetic
agcaaauuccaucguguaa

SEQ ID NO: 66 - RNA, 19 nt, Artificial Sequence
  Synthetic
caaauuccaucguguaauc

SEQ ID NO: 67 - RNA, 19 nt, Artificial Sequence
  Synthetic
aauuccaucguguaaucaa

SEQ ID NO: 68 - RNA, 19 nt, Artificial Sequence
  Synthetic
uuccaucguguaaucaagg

SEQ ID NO: 69 - RNA, 19 nt, Artificial Sequence
  Synthetic
ccaucguguaaucaaggac

SEQ ID NO: 70 - RNA, 19 nt, Artificial Sequence
  Synthetic
aucguguaaucaaggacuu

SEQ ID NO: 71 - RNA, 19 nt, Artificial Sequence
  Synthetic
cguguaaucaaggacuuca

SEQ ID NO: 72 - RNA, 19 nt, Artificial Sequence
  Synthetic
uguaaucaaggacuucaug

SEQ ID NO: 73 - RNA, 19 nt, Artificial Sequence
  Synthetic
uaaucaaggacuucaugau

SEQ ID NO: 74 - RNA, 19 nt, Artificial Sequence
  Synthetic
aucaaggacuucaugaucc

SEQ ID NO: 75 - RNA, 19 nt, Artificial Sequence
  Synthetic
caaggacuucaugauccag

SEQ ID NO: 76 - RNA, 19 nt, Artificial Sequence
  Synthetic
aggacuucaugauccaggg

SEQ ID NO: 77 - RNA, 19 nt, Artificial Sequence
  Synthetic
gacuucaugauccagggcg

SEQ ID NO: 78 - RNA, 19 nt, Artificial Sequence
  Synthetic
cuucaugauccagggcgga

SEQ ID NO: 79 - RNA, 19 nt, Artificial Sequence
  Synthetic
ucaugauccagggcggaga

SEQ ID NO: 80 - RNA, 19 nt, Artificial Sequence
  Synthetic
augauccagggcggagacu

SEQ ID NO: 81 - RNA, 19 nt, Artificial Sequence
  Synthetic
gauccagggcggagacuuc

SEQ ID NO: 82 - RNA, 19 nt, Artificial Sequence
  Synthetic
uccagggcggagacuucac

SEQ ID NO: 83 - RNA, 19 nt, Artificial Sequence
  Synthetic
cagggcggagacuucacca

SEQ ID NO: 84 - RNA, 19 nt, Artificial Sequence
  Synthetic
gggcggagacuucaccagg

SEQ ID NO: 85 - RNA, 19 nt, Artificial Sequence
  Synthetic
gcggagacuucaccagggg

SEQ ID NO: 86 - RNA, 19 nt, Artificial Sequence
  Synthetic
ggagacuucaccaggggag

SEQ ID NO: 87 - RNA, 19 nt, Artificial Sequence
  Synthetic
agacuucaccaggggagau

SEQ ID NO: 88 - RNA, 19 nt, Artificial Sequence
  Synthetic
acuucaccaggggagaugg

SEQ ID NO: 89 - RNA, 19 nt, Artificial Sequence
  Synthetic
uucaccaggggagauggca

SEQ ID NO: 90 - RNA, 19 nt, Artificial Sequence
  Synthetic
caccaggggagauggcaca

SEQ ID NO: 91 - RNA, 19 nt, Artificial Sequence
  Synthetic
ccaggggagauggcacagg

SEQ ID NO: 92 - RNA, 19 nt, Artificial Sequence
  Synthetic
aggggagauggcacaggag

SEQ ID NO: 93 - RNA, 19 nt, Artificial Sequence
  Synthetic
gggagauggcacaggagga

SEQ ID NO: 94 - RNA, 19 nt, Artificial Sequence
  Synthetic
gagauggcacaggaggaaa

SEQ ID NO: 95 - RNA, 19 nt, Artificial Sequence
  Synthetic
gauggcacaggaggaaaga

SEQ ID NO: 96 - RNA, 19 nt, Artificial Sequence
  Synthetic
uggcacaggaggaaagagc

SEQ ID NO: 97 - RNA, 19 nt, Artificial Sequence
  Synthetic
gcacaggaggaaagagcau

SEQ ID NO: 98 - RNA, 19 nt, Artificial Sequence
  Synthetic
acaggaggaaagagcaucu

SEQ ID NO: 99 - RNA, 19 nt, Artificial Sequence
  Synthetic
aggaggaaagagcaucuac

SEQ ID NO: 100 - RNA, 19 nt, Artificial Sequence
  Synthetic
gaggaaagagcaucuacgg

SEQ ID NO: 101 - RNA, 19 nt, Artificial Sequence
  Synthetic
ggaaagagcaucuacggug

SEQ ID NO: 102 - RNA, 19 nt, Artificial Sequence
  Synthetic
aaagagcaucuacggugag

SEQ ID NO: 103 - RNA, 19 nt, Artificial Sequence
  Synthetic
agagcaucuacggugagcg

SEQ ID NO: 104 - RNA, 19 nt, Artificial Sequence
  Synthetic
agcaucuacggugagcgcu

SEQ ID NO: 105 - RNA, 19 nt, Artificial Sequence
  Synthetic
caucuacggugagcgcuuc

SEQ ID NO: 106 - RNA, 19 nt, Artificial Sequence
  Synthetic
ucuacggugagcgcuuccc

SEQ ID NO: 107 - RNA, 19 nt, Artificial Sequence
  Synthetic
uacggugagcgcuuccccg

SEQ ID NO: 108 - RNA, 19 nt, Artificial Sequence
  Synthetic
cggugagcgcuuccccgau

SEQ ID NO: 109 - RNA, 19 nt, Artificial Sequence
  Synthetic
gugagcgcuuccccgauga

SEQ ID NO: 110 - RNA, 19 nt, Artificial Sequence
  Synthetic
gagcgcuuccccgaugaga

SEQ ID NO: 111 - RNA, 19 nt, Artificial Sequence
  Synthetic
gcgcuuccccgaugagaac

SEQ ID NO: 112 - RNA, 19 nt, Artificial Sequence
  Synthetic
gcuuccccgaugagaacuu

SEQ ID NO: 113 - RNA, 19 nt, Artificial Sequence
  Synthetic
uuccccgaugagaacuuca

SEQ ID NO: 114 - RNA, 19 nt, Artificial Sequence
  Synthetic
ccccgaugagaacuucaaa

SEQ ID NO: 115 - RNA, 19 nt, Artificial Sequence
  Synthetic
ccgaugagaacuucaaacu

SEQ ID NO: 116 - RNA, 19 nt, Artificial Sequence
  Synthetic
gaugagaacuucaaacuga

SEQ ID NO: 117 - RNA, 19 nt, Artificial Sequence
  Synthetic
ugagaacuucaaacugaag

SEQ ID NO: 118 - RNA, 19 nt, Artificial Sequence
  Synthetic
agaacuucaaacugaagca

SEQ ID NO: 119 - RNA, 19 nt, Artificial Sequence
  Synthetic
aacuucaaacugaagcacu

SEQ ID NO: 120 - RNA, 19 nt, Artificial Sequence
  Synthetic
cuucaaacugaagcacuac

SEQ ID NO: 121 - RNA, 19 nt, Artificial Sequence
  Synthetic
ucaaacugaagcacuacgg

SEQ ID NO: 122 - RNA, 19 nt, Artificial Sequence
  Synthetic
acgggcaaggccaaguggg

SEQ ID NO: 123 - RNA, 19 nt, Artificial Sequence
  Synthetic
cgggcaaggccaaguggga

SEQ ID NO: 124 - RNA, 19 nt, Artificial Sequence
  Synthetic
gggcaaggccaagugggau

SEQ ID NO: 125 - RNA, 19 nt, Artificial Sequence
  Synthetic
ggcaaggccaagugggaug

SEQ ID NO: 126 - RNA, 19 nt, Artificial Sequence
  Synthetic
gcaaggccaagugggaugc

SEQ ID NO: 127 - RNA, 19 nt, Artificial Sequence
  Synthetic
caaggccaagugggaugcc

SEQ ID NO: 128 - RNA, 19 nt, Artificial Sequence
  Synthetic
aaggccaagugggaugccu

SEQ ID NO: 129 - RNA, 19 nt, Artificial Sequence
  Synthetic
aggccaagugggaugccug

SEQ ID NO: 130 - RNA, 19 nt, Artificial Sequence
  Synthetic
ggccaagugggaugccugg

SEQ ID NO: 131 - RNA, 19 nt, Artificial Sequence
  Synthetic
gccaagugggaugccugga

SEQ ID NO: 132 - RNA, 19 nt, Artificial Sequence
  Synthetic
ccaagugggaugccuggaa

SEQ ID NO: 133 - RNA, 19 nt, Artificial Sequence
  Synthetic
caagugggaugccuggaau

SEQ ID NO: 134 - RNA, 19 nt, Artificial Sequence
  Synthetic
aagugggaugccuggaaug

SEQ ID NO: 135 - RNA, 19 nt, Artificial Sequence
  Synthetic
agugggaugccuggaauga

SEQ ID NO: 136 - RNA, 19 nt, Artificial Sequence
  Synthetic
gugggaugccuggaaugag

SEQ ID NO: 137 - RNA, 19 nt, Artificial Sequence
  Synthetic
ugggaugccuggaaugagc

SEQ ID NO: 138 - RNA, 19 nt, Artificial Sequence
  Synthetic
gggaugccuggaaugagcu

SEQ ID NO: 139 - RNA, 19 nt, Artificial Sequence
  Synthetic
ggaugccuggaaugagcug

SEQ ID NO: 140 - RNA, 19 nt, Artificial Sequence
  Synthetic
gaugccuggaaugagcuga

SEQ ID NO: 141 - RNA, 19 nt, Artificial Sequence
  Synthetic
augccuggaaugagcugaa

SEQ ID NO: 142 - RNA, 19 nt, Artificial Sequence
  Synthetic
ugccuggaaugagcugaaa

SEQ ID NO: 143 - RNA, 19 nt, Artificial Sequence
  Synthetic
gccuggaaugagcugaaag

SEQ ID NO: 144 - RNA, 19 nt, Artificial Sequence
  Synthetic
ccuggaaugagcugaaagg

SEQ ID NO: 145 - RNA, 19 nt, Artificial Sequence
  Synthetic
cuggaaugagcugaaaggg

SEQ ID NO: 146 - RNA, 19 nt, Artificial Sequence
  Synthetic
uggaaugagcugaaaggga

SEQ ID NO: 147 - RNA, 19 nt, Artificial Sequence
  Synthetic
ggaaugagcugaaagggac

SEQ ID NO: 148 - RNA, 19 nt, Artificial Sequence
  Synthetic
gaaugagcugaaagggacu

SEQ ID NO: 149 - RNA, 19 nt, Artificial Sequence
  Synthetic
aaugagcugaaagggacuu

SEQ ID NO: 150 - RNA, 19 nt, Artificial Sequence
  Synthetic
augagcugaaagggacuuc

SEQ ID NO: 151 - RNA, 19 nt, Artificial Sequence
  Synthetic
ugagcugaaagggacuucc

SEQ ID NO: 152 - RNA, 19 nt, Artificial Sequence
  Synthetic
gagcugaaagggacuucca

SEQ ID NO: 153 - RNA, 19 nt, Artificial Sequence
  Synthetic
agcugaaagggacuuccaa

SEQ ID NO: 154 - RNA, 19 nt, Artificial Sequence
  Synthetic
gcugaaagggacuuccaag

SEQ ID NO: 155 - RNA, 19 nt, Artificial Sequence
  Synthetic
cugaaagggacuuccaagg

SEQ ID NO: 156 - RNA, 19 nt, Artificial Sequence
  Synthetic
ugaaagggacuuccaagga

SEQ ID NO: 157 - RNA, 19 nt, Artificial Sequence
  Synthetic
gaaagggacuuccaaggaa

SEQ ID NO: 158 - RNA, 19 nt, Artificial Sequence
  Synthetic
aaagggacuuccaaggaag

SEQ ID NO: 159 - RNA, 19 nt, Artificial Sequence
  Synthetic
aagggacuuccaaggaaga

SEQ ID NO: 160 - RNA, 19 nt, Artificial Sequence
  Synthetic
agggacuuccaaggaagau

SEQ ID NO: 161 - RNA, 19 nt, Artificial Sequence
  Synthetic
gggacuuccaaggaagaug

SEQ ID NO: 162 - RNA, 19 nt, Artificial Sequence
  Synthetic
ggacuuccaaggaagaugc

SEQ ID NO: 163 - RNA, 19 nt, Artificial Sequence
  Synthetic
gacuuccaaggaagaugcc

SEQ ID NO: 164 - RNA, 19 nt, Artificial Sequence
  Synthetic
acuuccaaggaagaugcca

SEQ ID NO: 165 - RNA, 19 nt, Artificial Sequence
  Synthetic
cuuccaaggaagaugccau

SEQ ID NO: 166 - RNA, 19 nt, Artificial Sequence
  Synthetic
uuccaaggaagaugccaug

SEQ ID NO: 167 - RNA, 19 nt, Artificial Sequence
  Synthetic
uccaaggaagaugccauga

SEQ ID NO: 168 - RNA, 19 nt, Artificial Sequence
  Synthetic
ccaaggaagaugccaugaa

SEQ ID NO: 169 - RNA, 19 nt, Artificial Sequence
  Synthetic
caaggaagaugccaugaaa

SEQ ID NO: 170 - RNA, 19 nt, Artificial Sequence
  Synthetic
aaggaagaugccaugaaag

SEQ ID NO: 171 - RNA, 19 nt, Artificial Sequence
  Synthetic
aggaagaugccaugaaagc

SEQ ID NO: 172 - RNA, 19 nt, Artificial Sequence
  Synthetic
ggaagaugccaugaaagcu

SEQ ID NO: 173 - RNA, 19 nt, Artificial Sequence
  Synthetic
gaagaugccaugaaagcuu

SEQ ID NO: 174 - RNA, 19 nt, Artificial Sequence
  Synthetic
aagaugccaugaaagcuua

SEQ ID NO: 175 - RNA, 19 nt, Artificial Sequence
  Synthetic
agaugccaugaaagcuuac

SEQ ID NO: 176 - RNA, 19 nt, Artificial Sequence
  Synthetic
gaugccaugaaagcuuaca

SEQ ID NO: 177 - RNA, 19 nt, Artificial Sequence
  Synthetic
augccaugaaagcuuacau

SEQ ID NO: 178 - RNA, 19 nt, Artificial Sequence
  Synthetic
ugccaugaaagcuuacauc

SEQ ID NO: 179 - RNA, 19 nt, Artificial Sequence
  Synthetic
gccaugaaagcuuacauca

SEQ ID NO: 180 - RNA, 19 nt, Artificial Sequence
  Synthetic
ccaugaaagcuuacaucaa

SEQ ID NO: 181 - RNA, 19 nt, Artificial Sequence
  Synthetic
caugaaagcuuacaucaac

SEQ ID NO: 182 - RNA, 19 nt, Artificial Sequence
  Synthetic
augaaagcuuacaucaaca

SEQ ID NO: 183 - RNA, 19 nt, Artificial Sequence
  Synthetic
ugaaagcuuacaucaacaa

SEQ ID NO: 184 - RNA, 19 nt, Artificial Sequence
  Synthetic
gaaagcuuacaucaacaaa

SEQ ID NO: 185 - RNA, 19 nt, Artificial Sequence
  Synthetic
aaagcuuacaucaacaaag

SEQ ID NO: 186 - RNA, 19 nt, Artificial Sequence
  Synthetic
aagcuuacaucaacaaagu

SEQ ID NO: 187 - RNA, 19 nt, Artificial Sequence
  Synthetic
agcuuacaucaacaaagua

SEQ ID NO: 188 - RNA, 19 nt, Artificial Sequence
  Synthetic
agcuuacaucacaaaguag

SEQ ID NO: 189 - RNA, 19 nt, Artificial Sequence
  Synthetic
cuuacaucaacaaaguaga

SEQ ID NO: 190 - RNA, 19 nt, Artificial Sequence
  Synthetic
uuacaucaacaaaguagaa

SEQ ID NO: 191 - RNA, 19 nt, Artificial Sequence
  Synthetic
uacaucaacaaaguagaag

SEQ ID NO: 192 - RNA, 19 nt, Artificial Sequence
  Synthetic
acaucaacaaaguagaaga

SEQ ID NO: 193 - RNA, 19 nt, Artificial Sequence
  Synthetic
caucaacaaaguagaagag

SEQ ID NO: 194 - RNA, 19 nt, Artificial Sequence
  Synthetic
aucaacaaaguagaagagc

SEQ ID NO: 195 - RNA, 19 nt, Artificial Sequence
  Synthetic
ucaacaaaguagaagagcu

SEQ ID NO: 196 - RNA, 19 nt, Artificial Sequence
  Synthetic
caacaaaguagaagagcua

SEQ ID NO: 197 - RNA, 19 nt, Artificial Sequence
  Synthetic
aacaaaguagaagagcuaa

SEQ ID NO: 198 - RNA, 19 nt, Artificial Sequence
  Synthetic
acaaaguagaagagcuaaa

SEQ ID NO: 199 - RNA, 19 nt, Artificial Sequence
  Synthetic
caaaguagaagagcuaaag

SEQ ID NO: 200 - RNA, 19 nt, Artificial Sequence
  Synthetic
aaaguagaagagcuaaaga

SEQ ID NO: 201 - RNA, 19 nt, Artificial Sequence
  Synthetic
aaguagaagagcuaaagaa

SEQ ID NO: 202 - RNA, 19 nt, Artificial Sequence
  Synthetic
aguagaagagcuaaagaaa

SEQ ID NO: 203 - RNA, 19 nt, Artificial Sequence
  Synthetic
guagaagagcuaaagaaaa

SEQ ID NO: 204 - RNA, 19 nt, Artificial Sequence
  Synthetic
uagaagagcuaaagaaaaa

SEQ ID NO: 205 - RNA, 19 nt, Artificial Sequence
  Synthetic
agaagagcuaaagaaaaaa

SEQ ID NO: 206 - RNA, 19 nt, Artificial Sequence
  Synthetic
gaagagcuaaagaaaaaau

SEQ ID NO: 207 - RNA, 19 nt, Artificial Sequence
  Synthetic
aagagcuaaagaaaaaaua

SEQ ID NO: 208 - RNA, 19 nt, Artificial Sequence
  Synthetic
agagcuaaagaaaaaauac

SEQ ID NO: 209 - RNA, 19 nt, Artificial Sequence
  Synthetic
gagcuaaagaaaaaauacg

SEQ ID NO: 210 - RNA, 19 nt, Artificial Sequence
  Synthetic
agcuaaagaaaaaauacgg

SEQ ID NO: 211 - RNA, 19 nt, Artificial Sequence
  Synthetic
gcuaaagaaaaaauacggg

SEQ ID NO: 212 - RNA, 19 nt, Artificial Sequence
  Synthetic
auccucauaaaggccaaga

SEQ ID NO: 213 - RNA, 19 nt, Artificial Sequence
  Synthetic
agauccucauaaaggccaa

SEQ ID NO: 214 - RNA, 19 nt, Artificial Sequence
  Synthetic
agagauccucauaaaggcc

SEQ ID NO: 215 - RNA, 19 nt, Artificial Sequence
  Synthetic
agagagauccucauaaagg

SEQ ID NO: 216 - RNA, 19 nt, Artificial Sequence
  Synthetic
ucagagagauccucauaaa

SEQ ID NO: 217 - RNA, 19 nt, Artificial Sequence
  Synthetic
aaucagagagauccucaua

SEQ ID NO: 218 - RNA, 19 nt, Artificial Sequence
  Synthetic
aaaaucagagagauccuca

SEQ ID NO: 219 - RNA, 19 nt, Artificial Sequence
  Synthetic
gaaaaaucagagagauccu

SEQ ID NO: 220 - RNA, 19 nt, Artificial Sequence
  Synthetic
aagaaaaaucagagagauc

SEQ ID NO: 221 - RNA, 19 nt, Artificial Sequence
  Synthetic
gcaagaaaaaucagagaga

SEQ ID NO: 222 - RNA, 19 nt, Artificial Sequence
  Synthetic
acgcaagaaaaaucagaga

SEQ ID NO: 223 - RNA, 19 nt, Artificial Sequence
  Synthetic
cgacgcaagaaaaaucaga

SEQ ID NO: 224 - RNA, 19 nt, Artificial Sequence
  Synthetic
cucgacgcaagaaaaauca

SEQ ID NO: 225 - RNA, 19 nt, Artificial Sequence
  Synthetic
aacucgacgcaagaaaaau

SEQ ID NO: 226 - RNA, 19 nt, Artificial Sequence
  Synthetic
aaaacucgacgcaagaaaa

SEQ ID NO: 227 - RNA, 19 nt, Artificial Sequence
  Synthetic
ggaaaacucgacgcaagaa

SEQ ID NO: 228 - RNA, 19 nt, Artificial Sequence
  Synthetic
ccggaaaacucgacgcaag

SEQ ID NO: 229 - RNA, 19 nt, Artificial Sequence
  Synthetic
uaccggaaaacucgacgca

SEQ ID NO: 230 - RNA, 19 nt, Artificial Sequence
  Synthetic
cuuaccggaaaacucgacg

SEQ ID NO: 231 - RNA, 19 nt, Artificial Sequence
  Synthetic
gucuuaccggaaaacucga

SEQ ID NO: 232 - RNA, 19 nt, Artificial Sequence
  Synthetic
aggucuuaccggaaaacuc

SEQ ID NO: 233 - RNA, 19 nt, Artificial Sequence
  Synthetic
aaaggucuuaccggaaaac

SEQ ID NO: 234 - RNA, 19 nt, Artificial Sequence
  Synthetic
cgaaaggucuuaccggaaa

SEQ ID NO: 235 - RNA, 19 nt, Artificial Sequence
  Synthetic
accgaaaggucuuaccgga

SEQ ID NO: 236 - RNA, 19 nt, Artificial Sequence
  Synthetic
guaccgaaaggucuuaccg

SEQ ID NO: 237 - RNA, 19 nt, Artificial Sequence
  Synthetic
aaguaccgaaaggucuuac

SEQ ID NO: 238 - RNA, 19 nt, Artificial Sequence
  Synthetic
cgaaguaccgaaaggucuu

SEQ ID NO: 239 - RNA, 19 nt, Artificial Sequence
  Synthetic
gacgaaguaccgaaagguc

SEQ ID NO: 240 - RNA, 19 nt, Artificial Sequence
  Synthetic
uggacgaaguaccgaaagg

SEQ ID NO: 241 - RNA, 19 nt, Artificial Sequence
  Synthetic
uguggacgaaguaccgaaa

SEQ ID NO: 242 - RNA, 19 nt, Artificial Sequence
  Synthetic
uuuguggacgaaguaccga

SEQ ID NO: 243 - RNA, 19 nt, Artificial Sequence
  Synthetic
uguuuguggacgaaguacc

SEQ ID NO: 244 - RNA, 19 nt, Artificial Sequence
  Synthetic
uguguuuguggacgaagua

SEQ ID NO: 245 - RNA, 19 nt, Artificial Sequence
  Synthetic
guuguguuuguggacgaag

SEQ ID NO: 246 - RNA, 19 nt, Artificial Sequence
  Synthetic
gaguuguguuuguggacga

SEQ ID NO: 247 - RNA, 19 nt, Artificial Sequence
  Synthetic
aggaguuguguuuguggac

SEQ ID NO: 248 - RNA, 19 nt, Artificial Sequence
  Synthetic
ggaggaguuguguuugugg

SEQ ID NO: 249 - RNA, 19 nt, Artificial Sequence
  Synthetic
gcggaggaguuguguuugu

SEQ ID NO: 250 - RNA, 19 nt, Artificial Sequence
  Synthetic
gcgcggaggaguuguguuu

SEQ ID NO: 251 - RNA, 19 nt, Artificial Sequence
  Synthetic
uugcgcggaggaguugugu

SEQ ID NO: 252 - RNA, 19 nt, Artificial Sequence
  Synthetic
aguugcgcggaggaguugu

SEQ ID NO: 253 - RNA, 19 nt, Artificial Sequence
  Synthetic
aaaguugcgcggaggaguu

SEQ ID NO: 254 - RNA, 19 nt, Artificial Sequence
  Synthetic
aaaaaguugcgcggaggag

SEQ ID NO: 255 - RNA, 19 nt, Artificial Sequence
  Synthetic
cgaaaaaguugcgcggagg

SEQ ID NO: 256 - RNA, 19 nt, Artificial Sequence
  Synthetic
cgcgaaaaaguugcgcgga

SEQ ID NO: 257 - RNA, 19 nt, Artificial Sequence
  Synthetic
accgcgaaaaaguugcgcg

SEQ ID NO: 258 - RNA, 19 nt, Artificial Sequence
  Synthetic
caaccgcgaaaaaguugcg

SEQ ID NO: 259 - RNA, 19 nt, Artificial Sequence
  Synthetic
aacaaccgcgaaaaaguug

SEQ ID NO: 260 - RNA, 19 nt, Artificial Sequence
  Synthetic
guaacaaccgcgaaaaagu

SEQ ID NO: 261 - RNA, 19 nt, Artificial Sequence
  Synthetic
aaguaacaaccgcgaaaaa

SEQ ID NO: 262 - RNA, 19 nt, Artificial Sequence
  Synthetic
ucaaguaacaaccgcgaaa

SEQ ID NO: 263 - RNA, 19 nt, Artificial Sequence
  Synthetic
agucaaguaacaaccgcga

SEQ ID NO: 264 - RNA, 19 nt, Artificial Sequence
  Synthetic
ccagucaaguaacaaccgc

SEQ ID NO: 265 - RNA, 19 nt, Artificial Sequence
  Synthetic
cgccagucaaguaacaacc

SEQ ID NO: 266 - RNA, 19 nt, Artificial Sequence
  Synthetic
gucgccagucaaguaacaa

SEQ ID NO: 267 - RNA, 19 nt, Artificial Sequence
  Synthetic
acgucgccagucaaguaac

SEQ ID NO: 268 - RNA, 19 nt, Artificial Sequence
  Synthetic
uuacgucgccagucaagua

SEQ ID NO: 269 - RNA, 19 nt, Artificial Sequence
  Synthetic
gauuacgucgccagucaag

SEQ ID NO: 270 - RNA, 19 nt, Artificial Sequence
  Synthetic
uggauuacgucgccaguca

SEQ ID NO: 271 - RNA, 19 nt, Artificial Sequence
  Synthetic
cguggauuacgucgccagu

SEQ ID NO: 272 - RNA, 19 nt, Artificial Sequence
  Synthetic
aucguggauuacgucgcca

SEQ ID NO: 273 - RNA, 19 nt, Artificial Sequence
  Synthetic
agaucguggauuacgucgc

SEQ ID NO: 274 - RNA, 19 nt, Artificial Sequence
  Synthetic
agagaucguggauuacguc

SEQ ID NO: 275 - RNA, 19 nt, Artificial Sequence
  Synthetic
aaagagaucguggauuacg

SEQ ID NO: 276 - RNA, 19 nt, Artificial Sequence
  Synthetic
aaaaagagaucguggauua

SEQ ID NO: 277 - RNA, 18 nt, Artificial Sequence
  Synthetic
gaaaaagagaucguggau

SEQ ID NO: 278 - RNA, 19 nt, Artificial Sequence
  Synthetic
acggaaaaagagaucgugg

SEQ ID NO: 279 - RNA, 19 nt, Artificial Sequence
  Synthetic
ugacggaaaaagagaucgu

SEQ ID NO: 280 - RNA, 19 nt, Artificial Sequence
  Synthetic
gaugacggaaaaagagauc

SEQ ID NO: 281 - RNA, 19 nt, Artificial Sequence
  Synthetic
acgaugacggaaaaagaga

SEQ ID NO: 282 - RNA, 19 nt, Artificial Sequence
  Synthetic
agacgaugacggaaaaaga

SEQ ID NO: 283 - RNA, 19 nt, Artificial Sequence
  Synthetic
aaagacgaugacggaaaaa

SEQ ID NO: 284 - RNA, 19 nt, Artificial Sequence
  Synthetic
ggaaagacgaugacggaaa

SEQ ID NO: 285 - RNA, 19 nt, Artificial Sequence
  Synthetic
acggaaagacgaugacgga

SEQ ID NO: 286 - RNA, 19 nt, Artificial Sequence
  Synthetic
gcacggaaagacgaugacg

SEQ ID NO: 287 - RNA, 19 nt, Artificial Sequence
  Synthetic
gagcacggaaagacgauga

SEQ ID NO: 288 - RNA, 19 nt, Artificial Sequence
  Synthetic
uggagcacggaaagacgau

SEQ ID NO: 289 - RNA, 19 nt, Artificial Sequence
  Synthetic
uuuggagcacggaaagacg

SEQ ID NO: 290 - RNA, 19 nt, Artificial Sequence
  Synthetic
guuuuggagcacggaaaga

SEQ ID NO: 291 - RNA, 19 nt, Artificial Sequence
  Synthetic
uuguuuuggagcacggaaa

SEQ ID NO: 292 - RNA, 19 nt, Artificial Sequence
  Synthetic
uguuguuuuggagcacgga

SEQ ID NO: 293 - RNA, 19 nt, Artificial Sequence
  Synthetic
guuguuguuuuggagcacg

SEQ ID NO: 294 - RNA, 19 nt, Artificial Sequence
  Synthetic
ccguuguuguuuuggagca

SEQ ID NO: 295 - RNA, 19 nt, Artificial Sequence
  Synthetic
cgccguuguuguuuuggag

SEQ ID NO: 296 - RNA, 19 nt, Artificial Sequence
  Synthetic
gccgccguuguuguuuugg

SEQ ID NO: 297 - RNA, 19 nt, Artificial Sequence
  Synthetic
ccgccgccguuguuguuuu

SEQ ID NO: 298 - RNA, 19 nt, Artificial Sequence
  Synthetic
ucccgccgccguuguuguu

SEQ ID NO: 299 - RNA, 19 nt, Artificial Sequence
  Synthetic
cuucccgccgccguuguug

SEQ ID NO: 300 - RNA, 19 nt, Artificial Sequence
  Synthetic
aacuucccgccgccguugu

SEQ ID NO: 301 - RNA, 19 nt, Artificial Sequence
  Synthetic
ugaacuucccgccgccguu

SEQ ID NO: 302 - RNA, 19 nt, Artificial Sequence
  Synthetic
gggagauagugaugaagua

SEQ ID NO: 303 - RNA, 19 nt, Artificial Sequence
  Synthetic
gaaguacauccauuauaag

SEQ ID NO: 304 - RNA, 19 nt, Artificial Sequence
  Synthetic
guacgacaaccgggagaua

SEQ ID NO: 305 - RNA, 19 nt, Artificial Sequence
  Synthetic
agauagugaugaaguacau

SEQ ID NO: 306 - RNA, 19 nt, Artificial Sequence
  Synthetic
ugaagacucugcucaguuu

SEQ ID NO: 307 - RNA, 19 nt, Artificial Sequence
  Synthetic
gcaugcggccucuguuuga

SEQ ID NO: 308 - RNA, 19 nt, Artificial Sequence
  Synthetic
ugcggccucuguuugauuu

SEQ ID NO: 309 - RNA, 19 nt, Artificial Sequence
  Synthetic
gagauagugaugaaguaca

SEQ ID NO: 310 - RNA, 19 nt, Artificial Sequence
  Synthetic
ggagauagugaugaaguac

SEQ ID NO: 311 - RNA, 19 nt, Artificial Sequence
  Synthetic
gaagacucugcucaguuug

SEQ ID NO: 312 - DNA, 19 bp, Artificial Sequence
  Synthetic
gaaagaatctgtagagaaa

SEQ ID NO: 313 - DNA, 19 bp, Artificial Sequence
  Synthetic
gcaatgagctgtttgaaga

SEQ ID NO: 314 - DNA, 19 bp, Artificial Sequence
  Synthetic
tgacaaaggtggataaatt

SEQ ID NO: 315 - DNA, 19 bp, Artificial Sequence
  Synthetic
ggaaatggatctctttgaa

SEQ ID NO: 316 - DNA, 19 bp, Artificial Sequence
  Synthetic
ggaaagtaatggtccaaca

SEQ ID NO: 317 - DNA, 19 bp, Artificial Sequence
  Synthetic
agacagttatgcagctatt

SEQ ID NO: 318 - DNA, 19 bp, Artificial Sequence
  Synthetic
ccaattctcggaagcaaga

SEQ ID NO: 319 - DNA, 19 bp, Artificial Sequence
  Synthetic
gaaagtaatggtccaacag

SEQ ID NO: 320 - DNA, 19 bp, Artificial Sequence
  Synthetic
gcgccagagtgaacaagta

SEQ ID NO: 321 - DNA, 19 bp, Artificial Sequence
  Synthetic
gaaggtggcccagctatgt

SEQ ID NO: 322 - DNA, 19 bp, Artificial Sequence
  Synthetic
ggaaccagcgccagagtga

SEQ ID NO: 323 - DNA, 19 bp, Artificial Sequence
  Synthetic
gagcgagattgcaggcata

SEQ ID NO: 324 - DNA, 19 bp, Artificial Sequence
  Synthetic
gttagtatctgatgacttg

SEQ ID NO: 325 - DNA, 19 bp, Artificial Sequence
  Synthetic
gaaatggaaccactaagaa

SEQ ID NO: 326 - DNA, 19 bp, Artificial Sequence
  Synthetic
ggaaatggaaccactaaga

SEQ ID NO: 327 - DNA, 19 bp, Artificial Sequence
  Synthetic
caactacactttccaatgc

SEQ ID NO: 328 - DNA, 19 bp, Artificial Sequence
  Synthetic
ccaccaagatttcatgata

SEQ ID NO: 329 - DNA, 19 bp, Artificial Sequence
  Synthetic
gatcggaactccaacaaga

SEQ ID NO: 330 - DNA, 19 bp, Artificial Sequence
  Synthetic
aaacggagctacagattat

SEQ ID NO: 331 - DNA, 19 bp, Artificial Sequence
  Synthetic
ccacacagcattcttgtaa

SEQ ID NO: 332 - DNA, 19 bp, Artificial Sequence
  Synthetic
gaagttaccttgagcaatc

SEQ ID NO: 333 - DNA, 19 bp, Artificial Sequence
  Synthetic
ggacttggccgatccagaa

SEQ ID NO: 334 - DNA, 19 bp, Artificial Sequence
  Synthetic
gcacttggatcgagatgag

SEQ ID NO: 335 - DNA, 19 bp, Artificial Sequence
  Synthetic
caaagaccaattcgcgtta

SEQ ID NO: 336 - DNA, 19 bp, Artificial Sequence
  Synthetic
ccgaatcaatcgcatcttc

SEQ ID NO: 337 - DNA, 19 bp, Artificial Sequence
  Synthetic
gacatgatcctgcagttca

SEQ ID NO: 338 - DNA, 19 bp, Artificial Sequence
  Synthetic
gagcgaatcgtcaccactt

SEQ ID NO: 339 - DNA, 19 bp, Artificial Sequence
  Synthetic
cctccgagctggcgtctac

SEQ ID NO: 340 - DNA, 19 bp, Artificial Sequence
  Synthetic
tcacatggttaacctctaa

SEQ ID NO: 341 - DNA, 19 bp, Artificial Sequence
  Synthetic
gatgagggacgccataatc

SEQ ID NO: 342 - DNA, 19 bp, Artificial Sequence
  Synthetic
cctctaactacaaatctta

SEQ ID NO: 343 - DNA, 19 bp, Artificial Sequence
  Synthetic
ggaaggtgctatccaaaat

SEQ ID NO: 344 - DNA, 19 bp, Artificial Sequence
  Synthetic
gcaagcaagtcctaacatt

SEQ ID NO: 345 - DNA, 19 bp, Artificial Sequence
  Synthetic
ggaagaggagtagacctta

SEQ ID NO: 346 - DNA, 19 bp, Artificial Sequence
  Synthetic
aggaatcagtgttgtagta

SEQ ID NO: 347 - DNA, 19 bp, Artificial Sequence
  Synthetic
gaagaggagtagaccttac

SEQ ID NO: 348 - DNA, 19 bp, Artificial Sequence
  Synthetic
gaaagtcaagcctggtatt

SEQ ID NO: 349 - DNA, 19 bp, Artificial Sequence
  Synthetic
aaagtcaagcctggtatta

SEQ ID NO: 350 - DNA, 19 bp, Artificial Sequence
  Synthetic
gctatgaacgtgaatgatc

SEQ ID NO: 351 - DNA, 19 bp, Artificial Sequence
  Synthetic
caagcctggtattacgttt

SEQ ID NO: 352 - DNA, 19 bp, Artificial Sequence
  Synthetic
ggaacaagatctgtcaatt

SEQ ID NO: 353 - DNA, 19 bp, Artificial Sequence
  Synthetic
gcaatgaacgtgaacgaaa

SEQ ID NO: 354 - DNA, 19 bp, Artificial Sequence
  Synthetic
caatgaacgtgaacgaaat

SEQ ID NO: 355 - DNA, 19 bp, Artificial Sequence
  Synthetic
ggacaggagcggtatcaca

SEQ ID NO: 356 - DNA, 19 bp, Artificial Sequence
  Synthetic
agacagagcttgagaataa

SEQ ID NO: 357 - DNA, 19 bp, Artificial Sequence
  Synthetic
gagaagatctttatgcaaa

SEQ ID NO: 358 - DNA, 19 bp, Artificial Sequence
  Synthetic
gaagagaaatcagcagata

SEQ ID NO: 359 - DNA, 19 bp, Artificial Sequence
  Synthetic
gcaagtaactcaactaaca

SEQ ID NO: 360 - DNA, 19 bp, Artificial Sequence
  Synthetic
gagctaatctgccacattg

SEQ ID NO: 361 - DNA, 19 bp, Artificial Sequence
  Synthetic
gcagatgagttactagaaa

SEQ ID NO: 362 - DNA, 19 bp, Artificial Sequence
  Synthetic
caacttaattgtccagaaa

SEQ ID NO: 363 - DNA, 19 bp, Artificial Sequence
  Synthetic
caacacaggattctgataa

SEQ ID NO: 364 - DNA, 19 bp, Artificial Sequence
  Synthetic
agattgtgcctaagtctct

SEQ ID NO: 365 - DNA, 19 bp, Artificial Sequence
  Synthetic
atgaagatctggaggtgaa

SEQ ID NO: 366 - DNA, 19 bp, Artificial Sequence
  Synthetic
tttgagacttcttgcctaa

SEQ ID NO: 367 - DNA, 19 bp, Artificial Sequence
  Synthetic
agatcaccctccttaaata

SEQ ID NO: 368 - DNA, 19 bp, Artificial Sequence
  Synthetic
caacggatttggtcgtatt

SEQ ID NO: 369 - DNA, 19 bp, Artificial Sequence
  Synthetic
gaaatcccatcaccatctt

SEQ ID NO: 370 - DNA, 19 bp, Artificial Sequence
  Synthetic
gacctcaactacatggttt

SEQ ID NO: 371 - DNA, 19 bp, Artificial Sequence
  Synthetic
tggtttacatgttccaata

SEQ ID NO: 372 - DNA, 19 bp, Artificial Sequence
  Synthetic
gaagaaatcgatgttgttt

SEQ ID NO: 373 - DNA, 19 bp, Artificial Sequence
  Synthetic
acacaaacttgaacagcta

SEQ ID NO: 374 - DNA, 19 bp, Artificial Sequence
  Synthetic
ggaagaaatcgatgttgtt

SEQ ID NO: 375 - DNA, 19 bp, Artificial Sequence
  Synthetic
gaaacgacgagaacagttg

SEQ ID NO: 376 - DNA, 19 bp, Artificial Sequence
  Synthetic
gcacatggatggaggttct

SEQ ID NO: 377 - DNA, 19 bp, Artificial Sequence
  Synthetic
gcagagagagcagatttga

SEQ ID NO: 378 - DNA, 19 bp, Artificial Sequence
  Synthetic
gaggttctctggatcaagt

SEQ ID NO: 379 - DNA, 19 bp, Artificial Sequence
  Synthetic
gagcagatttgaagcaact

SEQ ID NO: 380 - DNA, 19 bp, Artificial Sequence
  Synthetic
caaagacgatgacttcgaa

SEQ ID NO: 381 - DNA, 19 bp, Artificial Sequence
  Synthetic
gatcagcatttgcatggaa

SEQ ID NO: 382 - DNA, 19 bp, Artificial Sequence
  Synthetic
tccaggagtttgtcaataa

SEQ ID NO: 383 - DNA, 19 bp, Artificial Sequence
  Synthetic
ggaagctgatccaccttga

SEQ ID NO: 384 - DNA, 19 bp, Artificial Sequence
  Synthetic
gcagaaatctaaggatata

SEQ ID NO: 385 - DNA, 19 bp, Artificial Sequence
  Synthetic
caacaaggatgaagtctat

SEQ ID NO: 386 - DNA, 19 bp, Artificial Sequence
  Synthetic
cagcagaaatctaaggata

SEQ ID NO: 387 - DNA, 19 bp, Artificial Sequence
  Synthetic
ctagatggctttctcagta

SEQ ID NO: 388 - DNA, 19 bp, Artificial Sequence
  Synthetic
agacaaggtcccaaagaca

SEQ ID NO: 389 - DNA, 19 bp, Artificial Sequence
  Synthetic
ggaatggcaagaccagcaa

SEQ ID NO: 390 - DNA, 19 bp, Artificial Sequence
  Synthetic
agaattattccagggttta

SEQ ID NO: 391 - DNA, 19 bp, Artificial Sequence
  Synthetic
gcagacaaggtcccaaaga

SEQ ID NO: 392 - DNA, 19 bp, Artificial Sequence
  Synthetic
agaagcagcttcaggatga

SEQ ID NO: 393 - DNA, 19 bp, Artificial Sequence
  Synthetic
gagcttgacttccagaaga

SEQ ID NO: 394 - DNA, 19 bp, Artificial Sequence
  Synthetic
ccaccgaagttcaccctaa

SEQ ID NO: 395 - DNA, 19 bp, Artificial Sequence
  Synthetic
gagaagagctcctccatca

SEQ ID NO: 396 - DNA, 19 bp, Artificial Sequence
  Synthetic
gaaagagcatctacggtga

SEQ ID NO: 397 - DNA, 19 bp, Artificial Sequence
  Synthetic
gaaaggatttggctacaaa

SEQ ID NO: 398 - DNA, 19 bp, Artificial Sequence
  Synthetic
acagcaaattccatcgtgt

SEQ ID NO: 399 - DNA, 19 bp, Artificial Sequence
  Synthetic
ggaaagactgttccaaaaa

SEQ ID NO: 400 - DNA, 19 bp, Artificial Sequence
  Synthetic
caacacgcctcatcctcta

SEQ ID NO: 401 - DNA, 19 bp, Artificial Sequence
  Synthetic
catgaaagcttacatcaac

SEQ ID NO: 402 - DNA, 19 bp, Artificial Sequence
  Synthetic
aagatgccatgaaagctta

SEQ ID NO: 403 - DNA, 19 bp, Artificial Sequence
  Synthetic
gcacataccgcctgagtct

SEQ ID NO: 404 - DNA, 19 bp, Artificial Sequence
  Synthetic
gatcaaatctgaagaagga

SEQ ID NO: 405 - DNA, 19 bp, Artificial Sequence
  Synthetic
gccaagaagtttcctaata

SEQ ID NO: 406 - DNA, 19 bp, Artificial Sequence
  Synthetic
cagcatatcttgaaccatt

SEQ ID NO: 407 - DNA, 19 bp, Artificial Sequence
  Synthetic
gaacaaaggaaacggatga

SEQ ID NO: 408 - DNA, 19 bp, Artificial Sequence
  Synthetic
cggaaacggtccaggctat

SEQ ID NO: 409 - DNA, 19 bp, Artificial Sequence
  Synthetic
gcttcgagcagacatgata

SEQ ID NO: 410 - DNA, 19 bp, Artificial Sequence
  Synthetic
cctacacggtcctcctata

SEQ ID NO: 411 - DNA, 19 bp, Artificial Sequence
  Synthetic
gccaagaacctcatcatct

SEQ ID NO: 412 - DNA, 19 bp, Artificial Sequence
  Synthetic
gatatgggctgaatacaaa

SEQ ID NO: 413 - DNA, 19 bp, Artificial Sequence
  Synthetic
gcactctgattgacaaata

SEQ ID NO: 414 - DNA, 19 bp, Artificial Sequence
  Synthetic
tgaagtctctgattaagta

SEQ ID NO: 415 - DNA, 19 bp, Artificial Sequence
  Synthetic
tcagagagatcctcataaa

SEQ ID NO: 416 - DNA, 19 bp, Artificial Sequence
  Synthetic
gcaagaagatcaccatttc

SEQ ID NO: 417 - DNA, 19 bp, Artificial Sequence
  Synthetic
gagagaaatttgaggatga

SEQ ID NO: 418 - DNA, 19 bp, Artificial Sequence
  Synthetic
gaaaggatttggctataag

SEQ ID NO: 419 - DNA, 19 bp, Artificial Sequence
  Synthetic
gaaagaaggcatgaacatt

SEQ ID NO: 420 - DNA, 19 bp, Artificial Sequence
  Synthetic
gggagatagtgatgaagta

SEQ ID NO: 421 - DNA, 19 bp, Artificial Sequence
  Synthetic
gaagtacatccattataag

SEQ ID NO: 422 - DNA, 19 bp, Artificial Sequence
  Synthetic
gtacgacaaccgggagata

SEQ ID NO: 423 - DNA, 19 bp, Artificial Sequence
  Synthetic
agatagtgatgaagtacat

SEQ ID NO: 424 - DNA, 19 bp, Artificial Sequence
  Synthetic
tgaagactctgctcagttt

SEQ ID NO: 425 - DNA, 19 bp, Artificial Sequence
  Synthetic
gcatgcggcctctgtttga

SEQ ID NO: 426 - RNA, 19 nt, Artificial Sequence
  Synthetic
gcacacagcuuacuacauc

SEQ ID NO: 427 - RNA, 19 nt, Artificial Sequence
  Synthetic
gaaaugcccugguaucuca

SEQ ID NO: 428 - RNA, 19 nt, Artificial Sequence
  Synthetic
gaaggaacgugaugugauc

SEQ ID NO: 429 - RNA, 19 nt, Artificial Sequence
  Synthetic
gcacuacuccuguguguga

SEQ ID NO: 430 - RNA, 19 nt, Artificial Sequence
  Synthetic
gaacccagcuggagaacuu

SEQ ID NO: 431 - RNA, 19 nt, Artificial Sequence
  Synthetic
gauauacagugugaucuua

SEQ ID NO: 432 - RNA, 19 nt, Artificial Sequence
  Synthetic
guacuacgauccugauuau

SEQ ID NO: 433 - RNA, 19 nt, Artificial Sequence
  Synthetic
gugccgaccuuuacaauuu

SEQ ID NO: 434 - DNA, 19 bp, Artificial Sequence
  Synthetic
gaaggaaactgaattcaaa

SEQ ID NO: 435 - DNA, 19 bp, Artificial Sequence
  Synthetic
ggaaatatgtactacgaaa

SEQ ID NO: 436 - DNA, 19 bp, Artificial Sequence
  Synthetic
ccacaaagcagtgaattta

SEQ ID NO: 437 - DNA, 19 bp, Artificial Sequence
  Synthetic
gtaacaagctcacgcagtt

SEQ ID NO: 438 - RNA, 19 nt, Artificial Sequence
  Synthetic
ccauaaagcaagacagauu

SEQ ID NO: 439 - RNA, 19 nt, Artificial Sequence
  Synthetic
ccuaagaaaucauggcauu

SEQ ID NO: 440 - RNA, 19 nt, Artificial Sequence
  Synthetic
gggaagagagaaacauuua

SEQ ID NO: 441 - RNA, 19 nt, Artificial Sequence
  Synthetic
gcgggaagauggcggaaca

SEQ ID NO: 442 - RNA, 19 nt, Artificial Sequence
  Synthetic
guuaaaaccugcaaagcua

SEQ ID NO: 443 - RNA, 19 nt, Artificial Sequence
  Synthetic
gcacacuuguauauugaaa

SEQ ID NO: 444 - RNA, 19 nt, Artificial Sequence
  Synthetic
gagagaaacauuuauggaa

SEQ ID NO: 445 - RNA, 19 nt, Artificial Sequence
  Synthetic
gcagauuaccaaagaagau

SEQ ID NO: 446 - RNA, 19 nt, Artificial Sequence
  Synthetic
cagaagcaguuuucaggaa

SEQ ID NO: 447 - RNA, 19 nt, Artificial Sequence
  Synthetic
ggguaacauuugucgauca

SEQ ID NO: 448 - RNA, 19 nt, Artificial Sequence
  Synthetic
uauggucaguugaggaaua

SEQ ID NO: 449 - RNA, 19 nt, Artificial Sequence
  Synthetic
acccaaauguccaauauaa

SEQ ID NO: 450 - RNA, 19 nt, Artificial Sequence
  Synthetic
gagaaacauuuauggaauc

SEQ ID NO: 451 - RNA, 19 nt, Artificial Sequence
  Synthetic
ggaugaaagcaaucugaga

SEQ ID NO: 452 - RNA, 19 nt, Artificial Sequence
  Synthetic
uaguagaacaagcaacaua

SEQ ID NO: 453 - RNA, 19 nt, Artificial Sequence
  Synthetic
cugagagauuugaauagaa

SEQ ID NO: 454 - RNA, 19 nt, Artificial Sequence
  Synthetic
cguaggagcucacagucua

SEQ ID NO: 455 - RNA, 19 nt, Artificial Sequence
  Synthetic
gauagggaagagagaaaca

SEQ ID NO: 456 - RNA, 19 nt, Artificial Sequence
  Synthetic
aguagaacaagcaacauaa

SEQ ID NO: 457 - RNA, 19 nt, Artificial Sequence
  Synthetic
cauaaagcaagacagauua

SEQ ID NO: 458 - RNA, 19 nt, Artificial Sequence
  Synthetic
gcccauaaagcaagacaga

SEQ ID NO: 459 - RNA, 19 nt, Artificial Sequence
  Synthetic
auaggcagauguaagguaa

SEQ ID NO: 460 - RNA, 19 nt, Artificial Sequence
  Synthetic
cugcaaagcuaaaauugaa

SEQ ID NO: 461 - RNA, 19 nt, Artificial Sequence
  Synthetic
augaaagcaaucugagaga

SEQ ID NO: 462 - RNA, 19 nt, Artificial Sequence
  Synthetic
gaaagaaggacacuuguau

SEQ ID NO: 463 - RNA, 19 nt, Artificial Sequence
  Synthetic
aauaguagaacaagcaaca

SEQ ID NO: 464 - RNA, 19 nt, Artificial Sequence
  Synthetic
auguauggaugaaagcaau

SEQ ID NO: 465 - RNA, 19 nt, Artificial Sequence
  Synthetic
gaaggacacuuguaugcua

SEQ ID NO: 466 - RNA, 19 nt, Artificial Sequence
  Synthetic
agaaagaaggacacuugua

SEQ ID NO: 467 - RNA, 19 nt, Artificial Sequence
  Synthetic
aggcagauguaagguaauu

SEQ ID NO: 468 - RNA, 19 nt, Artificial Sequence
  Synthetic
ggaccuaggauuagaaaau

SEQ ID NO: 469 - RNA, 19 nt, Artificial Sequence
  Synthetic
aggaagaaccugacccuaa

SEQ ID NO: 470 - RNA, 19 nt, Artificial Sequence
  Synthetic
gcgugaaccugguggugau

SEQ ID NO: 471 - RNA, 19 nt, Artificial Sequence
  Synthetic
agacagaaugcuucaggaa

SEQ ID NO: 472 - RNA, 19 nt, Artificial Sequence
  Synthetic
gagaaugaauagugcuguu

SEQ ID NO: 473 - RNA, 19 nt, Artificial Sequence
  Synthetic
ugucuacaauggugaacaa

SEQ ID NO: 474 - RNA, 19 nt, Artificial Sequence
  Synthetic
acagaaugcuucaggaauc

SEQ ID NO: 475 - RNA, 19 nt, Artificial Sequence
  Synthetic
gcaagagguuuaugugcga

SEQ ID NO: 476 - RNA, 19 nt, Artificial Sequence
  Synthetic
caccagaguaucagaauga

SEQ ID NO: 477 - RNA, 19 nt, Artificial Sequence
  Synthetic
guuaugagcagcugcagaa

SEQ ID NO: 478 - RNA, 19 nt, Artificial Sequence
  Synthetic
cacucaggaccuaggauua

SEQ ID NO: 479 - RNA, 19 nt, Artificial Sequence
  Synthetic
aggacaggcugcugaaguu

SEQ ID NO: 480 - RNA, 19 nt, Artificial Sequence
  Synthetic
cugcagacacagaggugau

SEQ ID NO: 481 - RNA, 19 nt, Artificial Sequence
  Synthetic
ggaagaaccugacccuaau

SEQ ID NO: 482 - RNA, 19 nt, Artificial Sequence
  Synthetic
cagauaaggaagaaccuga

SEQ ID NO: 483 - RNA, 19 nt, Artificial Sequence
  Synthetic
ccggcagacaccagaguau

SEQ ID NO: 484 - RNA, 19 nt, Artificial Sequence
  Synthetic
cagaggugauuguggccuu

SEQ ID NO: 485 - RNA, 19 nt, Artificial Sequence
  Synthetic
ccagaguaucagaaugaga

SEQ ID NO: 486 - RNA, 19 nt, Artificial Sequence
  Synthetic
augcacaauuucuggacau

SEQ ID NO: 487 - RNA, 19 nt, Artificial Sequence
  Synthetic
ccaacgggaugcagcgcuu

SEQ ID NO: 488 - RNA, 19 nt, Artificial Sequence
  Synthetic
guugugagcuggaaaagaa

SEQ ID NO: 489 - RNA, 19 nt, Artificial Sequence
  Synthetic
ggaagggaguugcuuguca

SEQ ID NO: 490 - RNA, 19 nt, Artificial Sequence
  Synthetic
ucaugagugcugaggccaa

SEQ ID NO: 491 - RNA, 19 nt, Artificial Sequence
  Synthetic
cagugaagacauaucccaa

SEQ ID NO: 492 - RNA, 19 nt, Artificial Sequence
  Synthetic
ccacauauuugaacuguac

SEQ ID NO: 493 - RNA, 19 nt, Artificial Sequence
  Synthetic
gagcaggacggaagguugu

SEQ ID NO: 494 - RNA, 19 nt, Artificial Sequence
  Synthetic
ggaccacgccugacaacca

SEQ ID NO: 495 - RNA, 19 nt, Artificial Sequence
  Synthetic
augagcagcugcagaacga

SEQ ID NO: 496 - RNA, 19 nt, Artificial Sequence
  Synthetic
gacagaaugcuucaggaau

SEQ ID NO: 497 - RNA, 19 nt, Artificial Sequence
  Synthetic
ggacacuggcuuucuccaa

SEQ ID NO: 498 - RNA, 19 nt, Artificial Sequence
  Synthetic
gguacgugcuagccggaaa

SEQ ID NO: 499 - RNA, 19 nt, Artificial Sequence
  Synthetic
gggaaacacagcugaugaa

SEQ ID NO: 500 - RNA, 19 nt, Artificial Sequence
  Synthetic
gagaucagcuccaaagaga

SEQ ID NO: 501 - RNA, 19 nt, Artificial Sequence
  Synthetic
gcuuuguagccguggguga

SEQ ID NO: 502 - RNA, 19 nt, Artificial Sequence
  Synthetic
uguccuggcucaagaaaca

SEQ ID NO: 503 - RNA, 19 nt, Artificial Sequence
  Synthetic
gacaagagguuccaggaga

SEQ ID NO: 504 - RNA, 19 nt, Artificial Sequence
  Synthetic
augagaauggcgugggcua

SEQ ID NO: 505 - RNA, 19 nt, Artificial Sequence
  Synthetic
gugcaagacaucaaugaca

SEQ ID NO: 506 - RNA, 19 nt, Artificial Sequence
  Synthetic
ugcaagacaucaaugacaa

SEQ ID NO: 507 - RNA, 19 nt, Artificial Sequence
  Synthetic
ccuccuaaaucaagcaucu

SEQ ID NO: 508 - RNA, 19 nt, Artificial Sequence
  Synthetic
acaucaaugacaagagguu

SEQ ID NO: 509 - RNA, 19 nt, Artificial Sequence
  Synthetic
guaccugcaagaugagaau

SEQ ID NO: 510 - RNA, 19 nt, Artificial Sequence
  Synthetic
uuacuucacuggugugcaa

SEQ ID NO: 511 - RNA, 19 nt, Artificial Sequence
  Synthetic
cuaugggacugaagacuca

SEQ ID NO: 512 - RNA, 19 nt, Artificial Sequence
  Synthetic
ucaagaucccacagaccaa

SEQ ID NO: 513 - RNA, 19 nt, Artificial Sequence
  Synthetic
ugucccagccacaguguua

SEQ ID NO: 514 - RNA, 19 nt, Artificial Sequence
  Synthetic
gcuccaaagagaugacugu

SEQ ID NO: 515 - RNA, 19 nt, Artificial Sequence
  Synthetic
caaagcggcaccagcgcaa

SEQ ID NO: 516 - RNA, 19 nt, Artificial Sequence
  Synthetic
ccaaugugucuguggccau

SEQ ID NO: 517 - RNA, 19 nt, Artificial Sequence
  Synthetic
cgggcaagucccucuuuaa

SEQ ID NO: 518 - RNA, 19 nt, Artificial Sequence
  Synthetic
aaacacagcugaugaacug

SEQ ID NO: 519 - RNA, 19 nt, Artificial Sequence
  Synthetic
gaaacacagcugaugaacu

SEQ ID NO: 520 - RNA, 19 nt, Artificial Sequence
  Synthetic
gcacagaugcccacguaug

SEQ ID NO: 521 - RNA, 19 nt, Artificial Sequence
  Synthetic
gauccugggugcagacuuc

SEQ ID NO: 522 - RNA, 19 nt, Artificial Sequence
  Synthetic
ucacuggugugcaagacau

SEQ ID NO: 523 - RNA, 19 nt, Artificial Sequence
  Synthetic
gaucagcuccaaagagaug

SEQ ID NO: 524 - RNA, 19 nt, Artificial Sequence
  Synthetic
cagauugcauacucuaaga

SEQ ID NO: 525 - RNA, 19 nt, Artificial Sequence
  Synthetic
gacacuauguggcaacuca

SEQ ID NO: 526 - RNA, 19 nt, Artificial Sequence
  Synthetic
gcaagacaucaaugacaag

SEQ ID NO: 527 - RNA, 19 nt, Artificial Sequence
  Synthetic
cagcuguccuggcucaaga

SEQ ID NO: 528 - RNA, 19 nt, Artificial Sequence
  Synthetic
ggagagagacugaggaaga

SEQ ID NO: 529 - RNA, 19 nt, Artificial Sequence
  Synthetic
aguuggaaaugaagaguaa

SEQ ID NO: 530 - RNA, 19 nt, Artificial Sequence
  Synthetic
ggaagaacuauguggaaga

SEQ ID NO: 531 - RNA, 19 nt, Artificial Sequence
  Synthetic
ccgcagaagacuuguguuu

SEQ ID NO: 532 - RNA, 19 nt, Artificial Sequence
  Synthetic
cauugacaguagugauaaa

SEQ ID NO: 533 - RNA, 19 nt, Artificial Sequence
  Synthetic
ggugauggaaguuggaaau

SEQ ID NO: 534 - RNA, 19 nt, Artificial Sequence
  Synthetic
gauggaaguuggaaaugaa

SEQ ID NO: 535 - RNA, 19 nt, Artificial Sequence
  Synthetic
aggccaaacuugaaauaca

SEQ ID NO: 536 - RNA, 19 nt, Artificial Sequence
  Synthetic
ucagaaagcuguaucucua

SEQ ID NO: 537 - RNA, 19 nt, Artificial Sequence
  Synthetic
aggagcagguagaguggaa

SEQ ID NO: 538 - RNA, 19 nt, Artificial Sequence
  Synthetic
ggccaaacuugaaauacaa

SEQ ID NO: 539 - RNA, 19 nt, Artificial Sequence
  Synthetic
cccaaggaagacagggaaa

SEQ ID NO: 540 - RNA, 19 nt, Artificial Sequence
  Synthetic
gagcaggugccgagagguu

SEQ ID NO: 541 - RNA, 19 nt, Artificial Sequence
  Synthetic
ggcauugacaguagugaua

SEQ ID NO: 542 - RNA, 19 nt, Artificial Sequence
  Synthetic
gaggaagaacuauguggaa

SEQ ID NO: 543 - RNA, 19 nt, Artificial Sequence
  Synthetic
gagagagacugaggaagaa

SEQ ID NO: 544 - RNA, 19 nt, Artificial Sequence
  Synthetic
ggaaaugaagaguaacuga

SEQ ID NO: 545 - RNA, 19 nt, Artificial Sequence
  Synthetic
caggauguguugauuuuaa

SEQ ID NO: 546 - RNA, 19 nt, Artificial Sequence
  Synthetic
ccacaaauggccaccguuu

SEQ ID NO: 547 - RNA, 19 nt, Artificial Sequence
  Synthetic
ggagcuugcuuauagaaaa

SEQ ID NO: 548 - RNA, 19 nt, Artificial Sequence
  Synthetic
ugggagagagacugaggaa

SEQ ID NO: 549 - RNA, 19 nt, Artificial Sequence
  Synthetic
gggcauugacaguagugau

SEQ ID NO: 550 - RNA, 19 nt, Artificial Sequence
  Synthetic
ccacacugaugaagcagau

SEQ ID NO: 551 - RNA, 19 nt, Artificial Sequence
  Synthetic
acauacugcccaaggaaga

SEQ ID NO: 552 - RNA, 19 nt, Artificial Sequence
  Synthetic
uccacauccuagagagcaa

SEQ ID NO: 553 - RNA, 19 nt, Artificial Sequence
  Synthetic
guacauacugcccaaggaa

SEQ ID NO: 554 - RNA, 19 nt, Artificial Sequence
  Synthetic
ccuuguacauacugcccaa

SEQ ID NO: 555 - RNA, 19 nt, Artificial Sequence
  Synthetic
cgacaagaucagaaagcug

SEQ ID NO: 556 - RNA, 19 nt, Artificial Sequence
  Synthetic
cagaagucuuguaucccaa

SEQ ID NO: 557 - RNA, 19 nt, Artificial Sequence
  Synthetic
gugaaggacaggaugggca

SEQ ID NO: 558 - RNA, 19 nt, Artificial Sequence
  Synthetic
augacuaaguugagagaau

SEQ ID NO: 559 - RNA, 19 nt, Artificial Sequence
  Synthetic
acaaagacaucgauugaua

SEQ ID NO: 560 - RNA, 19 nt, Artificial Sequence
  Synthetic
ggucaaaguucauagaguu

SEQ ID NO: 561 - RNA, 19 nt, Artificial Sequence
  Synthetic
gaagagagcaacucagaua

SEQ ID NO: 562 - RNA, 19 nt, Artificial Sequence
  Synthetic
ucacaagcagaaagagaaa

SEQ ID NO: 563 - RNA, 19 nt, Artificial Sequence
  Synthetic
gggaguacuuuguggagau

SEQ ID NO: 564 - RNA, 19 nt, Artificial Sequence
  Synthetic
cuuugaaaucagaggaauu

SEQ ID NO: 565 - RNA, 19 nt, Artificial Sequence
  Synthetic
ggagacaucuggaaaguuu

SEQ ID NO: 566 - RNA, 19 nt, Artificial Sequence
  Synthetic
uuaugaacuuggagaguau

SEQ ID NO: 567 - RNA, 19 nt, Artificial Sequence
  Synthetic
agauaaagcuuaggucaaa

SEQ ID NO: 568 - RNA, 19 nt, Artificial Sequence
  Synthetic
gcaagaagaaaucaugaua

SEQ ID NO: 569 - RNA, 19 nt, Artificial Sequence
  Synthetic
ggagaguauauaagaaaga

SEQ ID NO: 570 - RNA, 19 nt, Artificial Sequence
  Synthetic
uccagaagcuccagugaua

SEQ ID NO: 571 - RNA, 19 nt, Artificial Sequence
  Synthetic
ggccaggcauggugguuua

SEQ ID NO: 572 - RNA, 19 nt, Artificial Sequence
  Synthetic
gaugaugcuuugagaacau

SEQ ID NO: 573 - RNA, 19 nt, Artificial Sequence
  Synthetic
gaacauacuuuggccauua

SEQ ID NO: 574 - RNA, 19 nt, Artificial Sequence
  Synthetic
ugacaaagacaucgauuga

SEQ ID NO: 575 - RNA, 19 nt, Artificial Sequence
  Synthetic
ccucauggccacaaggauu

SEQ ID NO: 576 - RNA, 19 nt, Artificial Sequence
  Synthetic
gcagugagccaaauguaaa

SEQ ID NO: 577 - RNA, 19 nt, Artificial Sequence
  Synthetic
agagugugguuacgaaaua

SEQ ID NO: 578 - RNA, 19 nt, Artificial Sequence
  Synthetic
ucaaggagaggcaaagaaa

SEQ ID NO: 579 - RNA, 19 nt, Artificial Sequence
  Synthetic
cuauaaacaugaacagguu

SEQ ID NO: 580 - RNA, 19 nt, Artificial Sequence
  Synthetic
gaaaaugggcuuuggauga

SEQ ID NO: 581 - RNA, 19 nt, Artificial Sequence
  Synthetic
cggaauuguacuuugagaa

SEQ ID NO: 582 - RNA, 19 nt, Artificial Sequence
  Synthetic
caacacaucaggaaagaga

SEQ ID NO: 583 - RNA, 19 nt, Artificial Sequence
  Synthetic
gaacaaggaaggaaagaug

SEQ ID NO: 584 - RNA, 19 nt, Artificial Sequence
  Synthetic
ggaaugagacgcagcacga

SEQ ID NO: 585 - RNA, 19 nt, Artificial Sequence
  Synthetic
uauagcagcucuugaagua

SEQ ID NO: 586 - RNA, 19 nt, Artificial Sequence
  Synthetic
aagcagaaagagaaaucua

SEQ ID NO: 587 - RNA, 19 nt, Artificial Sequence
  Synthetic
gguuuauauucgaagcaca

SEQ ID NO: 588 - RNA, 19 nt, Artificial Sequence
  Synthetic
cgccaaagauggagggaau

SEQ ID NO: 589 - RNA, 19 nt, Artificial Sequence
  Synthetic
aggauaagcugcugagguu

SEQ ID NO: 590 - RNA, 19 nt, Artificial Sequence
  Synthetic
ccgccaaagauggagggaa

SEQ ID NO: 591 - RNA, 19 nt, Artificial Sequence
  Synthetic
cccucaagauggucaugua

SEQ ID NO: 592 - RNA, 19 nt, Artificial Sequence
  Synthetic
ccaaagauggagggaaugu

SEQ ID NO: 593 - RNA, 19 nt, Artificial Sequence
  Synthetic
ccagcaagcccacggucuu

SEQ ID NO: 594 - RNA, 19 nt, Artificial Sequence
  Synthetic
ggauccugcugaaugcuau

SEQ ID NO: 595 - RNA, 19 nt, Artificial Sequence
  Synthetic
aaagauggagggaauguca

SEQ ID NO: 596 - RNA, 19 nt, Artificial Sequence
  Synthetic
ccaacauguaugcucagua

SEQ ID NO: 597 - RNA, 19 nt, Artificial Sequence
  Synthetic
gcgcagggcauggaagguu

SEQ ID NO: 598 - RNA, 19 nt, Artificial Sequence
  Synthetic
caacauguaugcucaguag

SEQ ID NO: 599 - RNA, 19 nt, Artificial Sequence
  Synthetic
ccauggacccacacaagga

SEQ ID NO: 600 - RNA, 19 nt, Artificial Sequence
  Synthetic
ugagucgccuggagaacuu

SEQ ID NO: 601 - RNA, 19 nt, Artificial Sequence
  Synthetic
gaucucggcuuuggauauu

SEQ ID NO: 602 - RNA, 19 nt, Artificial Sequence
  Synthetic
ugaaugcuauccuugcaaa

SEQ ID NO: 603 - RNA, 19 nt, Artificial Sequence
  Synthetic
ucaagauggucauguacuc

SEQ ID NO: 604 - RNA, 19 nt, Artificial Sequence
  Synthetic
gcugaaugcuauccuugca

SEQ ID NO: 605 - RNA, 19 nt, Artificial Sequence
  Synthetic
gggauccugcugaaugcua

SEQ ID NO: 606 - RNA, 19 nt, Artificial Sequence
  Synthetic
uugcccagaucucggcuuu

SEQ ID NO: 607 - RNA, 19 nt, Artificial Sequence
  Synthetic
cuacgaggccuuccugagu

SEQ ID NO: 608 - RNA, 19 nt, Artificial Sequence
  Synthetic
caagauggucauguacuca

SEQ ID NO: 609 - RNA, 19 nt, Artificial Sequence
  Synthetic
gaaucccgccaaagaugga

SEQ ID NO: 610 - RNA, 19 nt, Artificial Sequence
  Synthetic
guucguggcucugguauuc

SEQ ID NO: 611 - RNA, 19 nt, Artificial Sequence
  Synthetic
gguguucguggcucuggua

SEQ ID NO: 612 - RNA, 19 nt, Artificial Sequence
  Synthetic
gcccguggcugaggauaag

SEQ ID NO: 613 - RNA, 19 nt, Artificial Sequence
  Synthetic
ccagaucucggcuuuggau

SEQ ID NO: 614 - RNA, 19 nt, Artificial Sequence
  Synthetic
gcccagaucucggcuuugg

SEQ ID NO: 615 - RNA, 19 nt, Artificial Sequence
  Synthetic
aagcaaacuucaacaauga

SEQ ID NO: 616 - RNA, 19 nt, Artificial Sequence
  Synthetic
ccuguaugauggaaggauu

SEQ ID NO: 617 - RNA, 19 nt, Artificial Sequence
  Synthetic
gcaggaauggcuugaaaca

SEQ ID NO: 618 - RNA, 19 nt, Artificial Sequence
  Synthetic
gagcauggcagaaggaaac

SEQ ID NO: 619 - RNA, 19 nt, Artificial Sequence
  Synthetic
gauuaccacuguacacaaa

SEQ ID NO: 620 - RNA, 19 nt, Artificial Sequence
  Synthetic
ucaucuugaaguuggauua

SEQ ID NO: 621 - RNA, 19 nt, Artificial Sequence
  Synthetic
augcaggaauggcuugaaa

SEQ ID NO: 622 - RNA, 19 nt, Artificial Sequence
  Synthetic
cuaaaucacacaucgacaa

SEQ ID NO: 623 - RNA, 19 nt, Artificial Sequence
  Synthetic
ugauaucaguggauuauga

SEQ ID NO: 624 - RNA, 19 nt, Artificial Sequence
  Synthetic
uaagauaaacucagugguu

SEQ ID NO: 625 - RNA, 19 nt, Artificial Sequence
  Synthetic
guaaaauaauggccugaau

SEQ ID NO: 626 - RNA, 19 nt, Artificial Sequence
  Synthetic
ccacuguacacaaaucuaa

SEQ ID NO: 627 - RNA, 19 nt, Artificial Sequence
  Synthetic
gaaggaaacacccugauau

SEQ ID NO: 628 - RNA, 19 nt, Artificial Sequence
  Synthetic
acaaagcaaacuucaacaa

SEQ ID NO: 629 - RNA, 19 nt, Artificial Sequence
  Synthetic
agaaggaaacacccugaua

SEQ ID NO: 630 - RNA, 19 nt, Artificial Sequence
  Synthetic
ucacacaucgacaaagcaa

SEQ ID NO: 631 - RNA, 19 nt, Artificial Sequence
  Synthetic
ggauuaccacuguacacaa

SEQ ID NO: 632 - RNA, 19 nt, Artificial Sequence
  Synthetic
uaaaucacacaucgacaaa

SEQ ID NO: 633 - RNA, 19 nt, Artificial Sequence
  Synthetic
acucagacuuccaaauugu

SEQ ID NO: 634 - RNA, 19 nt, Artificial Sequence
  Synthetic
gaaccuucugcuuagagua

SEQ ID NO: 635 - RNA, 19 nt, Artificial Sequence
  Synthetic
caaagcaaacuucaacaau

SEQ ID NO: 636 - RNA, 19 nt, Artificial Sequence
  Synthetic
cgacaaagcaaacuucaac

SEQ ID NO: 637 - RNA, 19 nt, Artificial Sequence
  Synthetic
uggaaggauuaccacugua

SEQ ID NO: 638 - RNA, 19 nt, Artificial Sequence
  Synthetic
aaagcaaacuucaacaaug

SEQ ID NO: 639 - RNA, 19 nt, Artificial Sequence
  Synthetic
ugaaguuggauuacucaga

SEQ ID NO: 640 - RNA, 19 nt, Artificial Sequence
  Synthetic
gauaucaguggauuaugaa

SEQ ID NO: 641 - RNA, 19 nt, Artificial Sequence
  Synthetic
ucagacuuccaaauuguaa

SEQ ID NO: 642 - RNA, 19 nt, Artificial Sequence
  Synthetic
ggaaggauuaccacuguac

SEQ ID NO: 643 - RNA, 19 nt, Artificial Sequence
  Synthetic
ucuccaaggugcgucauau

SEQ ID NO: 644 - RNA, 19 nt, Artificial Sequence
  Synthetic
uuacucagacuuccaaauu

SEQ ID NO: 645 - RNA, 19 nt, Artificial Sequence
  Synthetic
gaauaauaguagcagagua

SEQ ID NO: 646 - RNA, 19 nt, Artificial Sequence
  Synthetic
gcacaaacuuuucuaauga

SEQ ID NO: 647 - RNA, 19 nt, Artificial Sequence
  Synthetic
cagcaaaggcaccgugaca

SEQ ID NO: 648 - RNA, 19 nt, Artificial Sequence
  Synthetic
gaagaugaagcuaggaaaa

SEQ ID NO: 649 - RNA, 19 nt, Artificial Sequence
  Synthetic
cagaguaccuugaucaauu

SEQ ID NO: 650 - RNA, 19 nt, Artificial Sequence
  Synthetic
cagaauguauacagaagau

SEQ ID NO: 651 - RNA, 19 nt, Artificial Sequence
  Synthetic
ggugaagaauaccagcaaa

SEQ ID NO: 652 - RNA, 19 nt, Artificial Sequence
  Synthetic
agaagaugaagcuaggaaa

SEQ ID NO: 653 - RNA, 19 nt, Artificial Sequence
  Synthetic
gaacagaguaccuugauca

SEQ ID NO: 654 - RNA, 19 nt, Artificial Sequence
  Synthetic
cagaagaugaagcuaggaa

SEQ ID NO: 655 - RNA, 19 nt, Artificial Sequence
  Synthetic
ggccagaagacaaagucaa

SEQ ID NO: 656 - RNA, 19 nt, Artificial Sequence
  Synthetic
gaauguauacagaagauga

SEQ ID NO: 657 - RNA, 19 nt, Artificial Sequence
  Synthetic
cacucaaauccguggacua

SEQ ID NO: 658 - RNA, 19 nt, Artificial Sequence
  Synthetic
uguaacacacugaacaaua

SEQ ID NO: 659 - RNA, 19 nt, Artificial Sequence
  Synthetic
gggugaagaauaccagcaa

SEQ ID NO: 660 - RNA, 19 nt, Artificial Sequence
  Synthetic
guagcagaguagggugaaa

SEQ ID NO: 661 - RNA, 19 nt, Artificial Sequence
  Synthetic
acacacugaacaauagaua

SEQ ID NO: 662 - RNA, 19 nt, Artificial Sequence
  Synthetic
uggcgagacaucaaauaaa

SEQ ID NO: 663 - RNA, 19 nt, Artificial Sequence
  Synthetic
ccacaaauauacccaacuu

SEQ ID NO: 664 - RNA, 19 nt, Artificial Sequence
  Synthetic
gguguuugcuucagaaugu

SEQ ID NO: 665 - RNA, 19 nt, Artificial Sequence
  Synthetic
ucggaagagugcagggugu

SEQ ID NO: 666 - RNA, 19 nt, Artificial Sequence
  Synthetic
agaugaagcuaggaaaaua

SEQ ID NO: 667 - RNA, 19 nt, Artificial Sequence
  Synthetic
aauaauaguagcagaguag

SEQ ID NO: 668 - RNA, 19 nt, Artificial Sequence
  Synthetic
gggcacagcauccggcuuu

SEQ ID NO: 669 - RNA, 19 nt, Artificial Sequence
  Synthetic
gugaagaauaccagcaaag

SEQ ID NO: 670 - RNA, 19 nt, Artificial Sequence
  Synthetic
gccagaagacaaagucaau

SEQ ID NO: 671 - RNA, 19 nt, Artificial Sequence
  Synthetic
gcuucagaauguauacaga

SEQ ID NO: 672 - RNA, 19 nt, Artificial Sequence
  Synthetic
gagcaagguuggaagcccu

SEQ ID NO: 673 - RNA, 19 nt, Artificial Sequence
  Synthetic
aagaauaccagcaaaggca

SEQ ID NO: 674 - RNA, 19 nt, Artificial Sequence
  Synthetic
cuucagaauguauacagaa

SEQ ID NO: 675 - RNA, 19 nt, Artificial Sequence
  Synthetic
gaucaagguaggagauaaa

SEQ ID NO: 676 - RNA, 19 nt, Artificial Sequence
  Synthetic
gcacaaacauggaaaguca

SEQ ID NO: 677 - RNA, 19 nt, Artificial Sequence
  Synthetic
cuauaaagauugugcagua

SEQ ID NO: 678 - RNA, 19 nt, Artificial Sequence
  Synthetic
cagcagaucuuguggaaaa

SEQ ID NO: 679 - RNA, 19 nt, Artificial Sequence
  Synthetic
gguaauagugaguugauaa

SEQ ID NO: 680 - RNA, 19 nt, Artificial Sequence
  Synthetic
ggaugacacucuagagcua

SEQ ID NO: 681 - RNA, 19 nt, Artificial Sequence
  Synthetic
ggauuaaccuggaaauauu

SEQ ID NO: 682 - RNA, 19 nt, Artificial Sequence
  Synthetic
agaauuagccaaagaguuu

SEQ ID NO: 683 - RNA, 19 nt, Artificial Sequence
  Synthetic
ggaaagacacugcuaauua

SEQ ID NO: 684 - RNA, 19 nt, Artificial Sequence
  Synthetic
guggagaaaugcaggaauu

SEQ ID NO: 685 - RNA, 19 nt, Artificial Sequence
  Synthetic
cagcagaagucauuggcua

SEQ ID NO: 686 - RNA, 19 nt, Artificial Sequence
  Synthetic
ccaccaagaagcagacaaa

SEQ ID NO: 687 - RNA, 19 nt, Artificial Sequence
  Synthetic
caaaucaagcugagguuaa

SEQ ID NO: 688 - RNA, 19 nt, Artificial Sequence
  Synthetic
gaaagaugauauagaggau

SEQ ID NO: 689 - RNA, 19 nt, Artificial Sequence
  Synthetic
gguauuagcauguguggua

SEQ ID NO: 690 - RNA, 19 nt, Artificial Sequence
  Synthetic
cagcaagccuuaauauaaa

SEQ ID NO: 691 - RNA, 19 nt, Artificial Sequence
  Synthetic
aagcaauuauggugacaaa

SEQ ID NO: 692 - RNA, 19 nt, Artificial Sequence
  Synthetic
agaacaaacuuuagagacu

SEQ ID NO: 693 - RNA, 19 nt, Artificial Sequence
  Synthetic
cugaagaaguugagaguag

SEQ ID NO: 694 - RNA, 19 nt, Artificial Sequence
  Synthetic
gcuuaaaugugcaaaguca

SEQ ID NO: 695 - RNA, 19 nt, Artificial Sequence
  Synthetic
agauguggauacagaauua

SEQ ID NO: 696 - RNA, 19 nt, Artificial Sequence
  Synthetic
ggagauaggauucaugaaa

SEQ ID NO: 697 - RNA, 19 nt, Artificial Sequence
  Synthetic
guagaagagaaguuggaua

SEQ ID NO: 698 - RNA, 19 nt, Artificial Sequence
  Synthetic
gaagauaaacagaaaguca

SEQ ID NO: 699 - RNA, 19 nt, Artificial Sequence
  Synthetic
gcaaacaaaugguaucuaa

SEQ ID NO: 700 - RNA, 19 nt, Artificial Sequence
  Synthetic
cuccagagaugaagauuua

SEQ ID NO: 701 - RNA, 19 nt, Artificial Sequence
  Synthetic
uaacaaagaucccgucaua

SEQ ID NO: 702 - RNA, 19 nt, Artificial Sequence
  Synthetic
acagaaagucagagacaga

SEQ ID NO: 703 - RNA, 19 nt, Artificial Sequence
  Synthetic
gauaaugagugucacguua

SEQ ID NO: 704 - RNA, 19 nt, Artificial Sequence
  Synthetic
aauuagagcuucagugaga

SEQ ID NO: 705 - RNA, 19 nt, Artificial Sequence
  Synthetic
gggccaagcaagcaggaaa

SEQ ID NO: 706 - RNA, 19 nt, Artificial Sequence
  Synthetic
gaaucaggcuggacgggaa

SEQ ID NO: 707 - RNA, 19 nt, Artificial Sequence
  Synthetic
ccuaggagacaaagcaaua

SEQ ID NO: 708 - RNA, 19 nt, Artificial Sequence
  Synthetic
cauacaauguggacagaca

SEQ ID NO: 709 - RNA, 19 nt, Artificial Sequence
  Synthetic
gcgaagacguggcgguguu

SEQ ID NO: 710 - RNA, 19 nt, Artificial Sequence
  Synthetic
ccaagaagcugcagcccau

SEQ ID NO: 711 - RNA, 19 nt, Artificial Sequence
  Synthetic
gggcauagauuucucaaca

SEQ ID NO: 712 - RNA, 19 nt, Artificial Sequence
  Synthetic
ggagacaaagcaauaauaa

SEQ ID NO: 713 - RNA, 19 nt, Artificial Sequence
  Synthetic
gugcaggaauggcuggcaa

SEQ ID NO: 714 - RNA, 19 nt, Artificial Sequence
  Synthetic
cguccauccuguacggcaa

SEQ ID NO: 715 - RNA, 19 nt, Artificial Sequence
  Synthetic
caagcaagcaggaaaguca

SEQ ID NO: 716 - RNA, 19 nt, Artificial Sequence
  Synthetic
caggaaagucaguaggagu

SEQ ID NO: 717 - RNA, 19 nt, Artificial Sequence
  Synthetic
cgaccagacgugaaugaga

SEQ ID NO: 718 - RNA, 19 nt, Artificial Sequence
  Synthetic
gacaauaaagggaccaaaa

SEQ ID NO: 719 - RNA, 19 nt, Artificial Sequence
  Synthetic
aggaauggcuggcaaagca

SEQ ID NO: 720 - RNA, 19 nt, Artificial Sequence
  Synthetic
cgcuuuaaccagugcaaca

SEQ ID NO: 721 - RNA, 19 nt, Artificial Sequence
  Synthetic
aggccaacuuccagaccau

SEQ ID NO: 722 - RNA, 19 nt, Artificial Sequence
  Synthetic
ggcauagauuucucaacaa

SEQ ID NO: 723 - RNA, 19 nt, Artificial Sequence
  Synthetic
caacacgacacgcggcaau

SEQ ID NO: 724 - RNA, 19 nt, Artificial Sequence
  Synthetic
cagacgugaaugagagcga

SEQ ID NO: 725 - RNA, 19 nt, Artificial Sequence
  Synthetic
gugccugguauguguggaa

SEQ ID NO: 726 - RNA, 19 nt, Artificial Sequence
  Synthetic
ggacaccugaagaagagaa

SEQ ID NO: 727 - RNA, 19 nt, Artificial Sequence
  Synthetic
uccagaaggucgccaagaa

SEQ ID NO: 728 - RNA, 19 nt, Artificial Sequence
  Synthetic
gcaaggcucaggacagcaa

SEQ ID NO: 729 - RNA, 19 nt, Artificial Sequence
  Synthetic
ccacucagcucaucuccaa

SEQ ID NO: 730 - RNA, 19 nt, Artificial Sequence
  Synthetic
ccggagacacgaaauauga

SEQ ID NO: 731 - RNA, 19 nt, Artificial Sequence
  Synthetic
ggagacacgaaauaugaga

SEQ ID NO: 732 - RNA, 19 nt, Artificial Sequence
  Synthetic
aggagacaaagcaauaaua

SEQ ID NO: 733 - RNA, 19 nt, Artificial Sequence
  Synthetic
acauggacauugacgugau

SEQ ID NO: 734 - RNA, 19 nt, Artificial Sequence
  Synthetic
gaugccagccagaauggaa

SEQ ID NO: 735 - RNA, 19 nt, Artificial Sequence
  Synthetic
guaugagagugacgagaaa

SEQ ID NO: 736 - RNA, 19 nt, Artificial Sequence
  Synthetic
cgcaagagacacugaaaua

SEQ ID NO: 737 - RNA, 19 nt, Artificial Sequence
  Synthetic
ggccaaggacgcugggaaa

SEQ ID NO: 738 - RNA, 19 nt, Artificial Sequence
  Synthetic
ccuuagugccagagaaaga

SEQ ID NO: 739 - RNA, 19 nt, Artificial Sequence
  Synthetic
gggcggugaacgagagaau

SEQ ID NO: 740 - RNA, 19 nt, Artificial Sequence
  Synthetic
augcauaacaucagggaca

SEQ ID NO: 741 - RNA, 19 nt, Artificial Sequence
  Synthetic
agaccaagcgcaagagaca

SEQ ID NO: 742 - RNA, 19 nt, Artificial Sequence
  Synthetic
ccuaccagcucaugcauaa

SEQ ID NO: 743 - RNA, 19 nt, Artificial Sequence
  Synthetic
aguacgagcugaacaggaa

SEQ ID NO: 744 - RNA, 19 nt, Artificial Sequence
  Synthetic
gcgcaggauuggaacauca

SEQ ID NO: 745 - RNA, 19 nt, Artificial Sequence
  Synthetic
aaacugauguggaguauga

SEQ ID NO: 746 - RNA, 19 nt, Artificial Sequence
  Synthetic
aguacagacugcagacauu

SEQ ID NO: 747 - RNA, 19 nt, Artificial Sequence
  Synthetic
ugccagagaaagagaaaga

SEQ ID NO: 748 - RNA, 19 nt, Artificial Sequence
  Synthetic
gcgcaagagacacugaaau

SEQ ID NO: 749 - RNA, 19 nt, Artificial Sequence
  Synthetic
ggaaauacauguaccccaa

SEQ ID NO: 750 - RNA, 19 nt, Artificial Sequence
  Synthetic
cuccuuagugccagagaaa

SEQ ID NO: 751 - RNA, 19 nt, Artificial Sequence
  Synthetic
gguggaaggaggcagaauu

SEQ ID NO: 752 - RNA, 19 nt, Artificial Sequence
  Synthetic
acauguaccccaagaauaa

SEQ ID NO: 753 - RNA, 19 nt, Artificial Sequence
  Synthetic
acaccaacguggcuaagaa

SEQ ID NO: 754 - RNA, 19 nt, Artificial Sequence
  Synthetic
cugggaaaucugugggcau

SEQ ID NO: 755 - RNA, 19 nt, Artificial Sequence
  Synthetic
cccacaagcccgugacaga

SEQ ID NO: 756 - RNA, 19 nt, Artificial Sequence
  Synthetic
ucaucauguuccugggaga

SEQ ID NO: 757 - RNA, 19 nt, Artificial Sequence
  Synthetic
ucucaaagccucuuauuuu

SEQ ID NO: 758 - RNA, 19 nt, Artificial Sequence
  Synthetic
cguggaacauuguggaucu

SEQ ID NO: 759 - RNA, 19 nt, Artificial Sequence
  Synthetic
aggauuggaacaucaguua

SEQ ID NO: 760 - RNA, 19 nt, Artificial Sequence
  Synthetic
aguaugagagugacgagaa

SEQ ID NO: 761 - RNA, 19 nt, Artificial Sequence
  Synthetic
auguggaguaugagaguga

SEQ ID NO: 762 - RNA, 19 nt, Artificial Sequence
  Synthetic
ccauccagauccugcggaa

SEQ ID NO: 763 - RNA, 19 nt, Artificial Sequence
  Synthetic
gcggugaacgagagaaugu

SEQ ID NO: 764 - RNA, 19 nt, Artificial Sequence
  Synthetic
gugaccaccacgagaguga

SEQ ID NO: 765 - RNA, 19 nt, Artificial Sequence
  Synthetic
cggaaacgguccaggcuau

SEQ ID NO: 766 - RNA, 19 nt, Artificial Sequence
  Synthetic
ggaagaaucuggugcagga

SEQ ID NO: 767 - RNA, 19 nt, Artificial Sequence
  Synthetic
gggcauagauuucucaaga

SEQ ID NO: 768 - RNA, 19 nt, Artificial Sequence
  Synthetic
ccugggagacaaagcaaua

SEQ ID NO: 769 - RNA, 19 nt, Artificial Sequence
  Synthetic
gggccaagaaagcagggaa

SEQ ID NO: 770 - RNA, 19 nt, Artificial Sequence
  Synthetic
cugaguacccagaugacua

SEQ ID NO: 771 - RNA, 19 nt, Artificial Sequence
  Synthetic
caaacuggggccugagaua

SEQ ID NO: 772 - RNA, 19 nt, Artificial Sequence
  Synthetic
gggagacaaagcaauaaua

SEQ ID NO: 773 - RNA, 19 nt, Artificial Sequence
  Synthetic
acaugaaauacgagaucca

SEQ ID NO: 774 - RNA, 19 nt, Artificial Sequence
  Synthetic
cagggaagucagugggagu

SEQ ID NO: 775 - RNA, 19 nt, Artificial Sequence
  Synthetic
ggaggcugaagcaggauaa

SEQ ID NO: 776 - RNA, 19 nt, Artificial Sequence
  Synthetic
caagaaagcagggaaguca

SEQ ID NO: 777 - RNA, 19 nt, Artificial Sequence
  Synthetic
gaugaaucgggccaagaaa

SEQ ID NO: 778 - RNA, 19 nt, Artificial Sequence
  Synthetic
gggcacugacugagacgau

SEQ ID NO: 779 - RNA, 19 nt, Artificial Sequence
  Synthetic
gauguuaccgagagcgaga

SEQ ID NO: 780 - RNA, 19 nt, Artificial Sequence
  Synthetic
uagacaaacaugugccaga

SEQ ID NO: 781 - RNA, 19 nt, Artificial Sequence
  Synthetic
cgguccuccuauacggaaa

SEQ ID NO: 782 - RNA, 19 nt, Artificial Sequence
  Synthetic
agccuggagacaugaaaua

SEQ ID NO: 783 - RNA, 19 nt, Artificial Sequence
  Synthetic
cggauguuaccgagagcga

SEQ ID NO: 784 - RNA, 19 nt, Artificial Sequence
  Synthetic
ggacacugggcauagauuu

SEQ ID NO: 785 - RNA, 19 nt, Artificial Sequence
  Synthetic
gcacugacugagacgauca

SEQ ID NO: 786 - RNA, 19 nt, Artificial Sequence
  Synthetic
uggagaccauccuggcuaa

SEQ ID NO: 787 - RNA, 19 nt, Artificial Sequence
  Synthetic
ggcagaagaaggacaaacu

SEQ ID NO: 788 - RNA, 19 nt, Artificial Sequence
  Synthetic
gaagucagugggaguggua

SEQ ID NO: 789 - RNA, 19 nt, Artificial Sequence
  Synthetic
gaucuuugcuucaguccuu

SEQ ID NO: 790 - RNA, 19 nt, Artificial Sequence
  Synthetic
ccuacacgguccuccuaua

SEQ ID NO: 791 - RNA, 19 nt, Artificial Sequence
  Synthetic
agacaugaaauacgagauc

SEQ ID NO: 792 - RNA, 19 nt, Artificial Sequence
  Synthetic
caagaaagcaggaaaguca

SEQ ID NO: 793 - RNA, 19 nt, Artificial Sequence
  Synthetic
gggccaagaaagcaggaaa

SEQ ID NO: 794 - RNA, 19 nt, Artificial Sequence
  Synthetic
ccuccauucuucugggaaa

SEQ ID NO: 795 - RNA, 19 nt, Artificial Sequence
  Synthetic
ugggaaacacaaagcaaua

SEQ ID NO: 796 - RNA, 19 nt, Artificial Sequence
  Synthetic
caggaaagucagugggagu

SEQ ID NO: 797 - RNA, 19 nt, Artificial Sequence
  Synthetic
gauccuagguggaggccga

SEQ ID NO: 798 - RNA, 19 nt, Artificial Sequence
  Synthetic
aggaauggcuggcgaagca

SEQ ID NO: 799 - RNA, 19 nt, Artificial Sequence
  Synthetic
ggugaaucgggccaagaaa

SEQ ID NO: 800 - RNA, 19 nt, Artificial Sequence
  Synthetic
ggaaacacaaagcaauaau

SEQ ID NO: 801 - RNA, 19 nt, Artificial Sequence
  Synthetic
cagcaaggaagacucauua

SEQ ID NO: 802 - RNA, 19 nt, Artificial Sequence
  Synthetic
gggaaacacaaagcaauaa

SEQ ID NO: 803 - RNA, 19 nt, Artificial Sequence
  Synthetic
uagacaagcaugugccaga

SEQ ID NO: 804 - RNA, 19 nt, Artificial Sequence
  Synthetic
ggcauggauuucucagcaa

SEQ ID NO: 805 - RNA, 19 nt, Artificial Sequence
  Synthetic
gguggaggccgaaaguaca

SEQ ID NO: 806 - RNA, 19 nt, Artificial Sequence
  Synthetic
caggauagcaguccagagu

SEQ ID NO: 807 - RNA, 19 nt, Artificial Sequence
  Synthetic
ccacgcagcucaucuccaa

SEQ ID NO: 808 - RNA, 19 nt, Artificial Sequence
  Synthetic
ccacugggcuaauucuaca

SEQ ID NO: 809 - RNA, 19 nt, Artificial Sequence
  Synthetic
agaaucuggugcaggaaug

SEQ ID NO: 810 - RNA, 19 nt, Artificial Sequence
  Synthetic
ucacaaaccuggaagauua

SEQ ID NO: 811 - RNA, 19 nt, Artificial Sequence
  Synthetic
cuggaagauuauagagaaa

SEQ ID NO: 812 - RNA, 19 nt, Artificial Sequence
  Synthetic
ggaugaagaugaagaugaa

SEQ ID NO: 813 - RNA, 19 nt, Artificial Sequence
  Synthetic
gggaagaagaggaagaaga

SEQ ID NO: 814 - RNA, 19 nt, Artificial Sequence
  Synthetic
aagaagaaauucaggauga

SEQ ID NO: 815 - RNA, 19 nt, Artificial Sequence
  Synthetic
cggaaggauaugaggaaga

SEQ ID NO: 816 - RNA, 19 nt, Artificial Sequence
  Synthetic
augaagaggaagaggaaaa

SEQ ID NO: 817 - RNA, 19 nt, Artificial Sequence
  Synthetic
gggagagggagaagaggaa

SEQ ID NO: 818 - RNA, 19 nt, Artificial Sequence
  Synthetic
ggaugaggaugaagaugaa

SEQ ID NO: 819 - RNA, 19 nt, Artificial Sequence
  Synthetic
ucacauacuuagauggauu

SEQ ID NO: 820 - RNA, 19 nt, Artificial Sequence
  Synthetic
ugaagaugaugaagaggaa

SEQ ID NO: 821 - RNA, 19 nt, Artificial Sequence
  Synthetic
caaucugaguggaaacaaa

SEQ ID NO: 822 - RNA, 19 nt, Artificial Sequence
  Synthetic
aggaagaggaagaggagga

SEQ ID NO: 823 - RNA, 19 nt, Artificial Sequence
  Synthetic
ggaagauuauagagaaagu

SEQ ID NO: 824 - RNA, 19 nt, Artificial Sequence
  Synthetic
aggaggaggaagaggaaga

SEQ ID NO: 825 - RNA, 19 nt, Artificial Sequence
  Synthetic
gagaggaagaagaugacua

SEQ ID NO: 826 - RNA, 19 nt, Artificial Sequence
  Synthetic
gguuguaagaagugggaua

SEQ ID NO: 827 - RNA, 19 nt, Artificial Sequence
  Synthetic
caauugaguuggagacuua

SEQ ID NO: 828 - RNA, 19 nt, Artificial Sequence
  Synthetic
caacagaccugcagaccaa

SEQ ID NO: 829 - RNA, 19 nt, Artificial Sequence
  Synthetic
gggaagaaauacugaagca

SEQ ID NO: 830 - RNA, 19 nt, Artificial Sequence
  Synthetic
guacagugcuauuaaagaa

SEQ ID NO: 831 - RNA, 19 nt, Artificial Sequence
  Synthetic
ggagaagaccugugcaaca

SEQ ID NO: 832 - RNA, 19 nt, Artificial Sequence
  Synthetic
aguaggaggagcaggaaau

SEQ ID NO: 833 - RNA, 19 nt, Artificial Sequence
  Synthetic
ggaucugccuucugaggaa

SEQ ID NO: 834 - RNA, 19 nt, Artificial Sequence
  Synthetic
gaguaggaggagcaggaaa

SEQ ID NO: 835 - RNA, 19 nt, Artificial Sequence
  Synthetic
uggauggaaccaaggaaua

SEQ ID NO: 836 - RNA, 19 nt, Artificial Sequence
  Synthetic
ggaauauaccgaaggucuu

SEQ ID NO: 837 - RNA, 19 nt, Artificial Sequence
  Synthetic
ggaggcaaguuaaccgaua

SEQ ID NO: 838 - RNA, 19 nt, Artificial Sequence
  Synthetic
gggaaacacauuaucacaa

SEQ ID NO: 839 - RNA, 19 nt, Artificial Sequence
  Synthetic
uggaauugcuuaugaagga

SEQ ID NO: 840 - RNA, 19 nt, Artificial Sequence
  Synthetic
agaccaaagcugaccgauu

SEQ ID NO: 841 - RNA, 19 nt, Artificial Sequence
  Synthetic
ggagcaggaaauaagauua

SEQ ID NO: 842 - RNA, 19 nt, Artificial Sequence
  Synthetic
acaaggaugugaagcauau

SEQ ID NO: 843 - RNA, 19 nt, Artificial Sequence
  Synthetic
cugaaggagaccuggguau

SEQ ID NO: 844 - RNA, 19 nt, Artificial Sequence
  Synthetic
guggagaagaccugugcaa

SEQ ID NO: 845 - RNA, 19 nt, Artificial Sequence
  Synthetic
aauuagaguuccaccuuua

SEQ ID NO: 846 - RNA, 19 nt, Artificial Sequence
  Synthetic
gcgaguaggaggagcagga

SEQ ID NO: 847 - RNA, 19 nt, Artificial Sequence
  Synthetic
ucaaaaggcaggaaugaua

SEQ ID NO: 848 - RNA, 19 nt, Artificial Sequence
  Synthetic
agacuugguucucaaauaa

SEQ ID NO: 849 - RNA, 19 nt, Artificial Sequence
  Synthetic
aagacuugguucucaaaua

SEQ ID NO: 850 - RNA, 19 nt, Artificial Sequence
  Synthetic
agccauagcaggaguuauu

SEQ ID NO: 851 - RNA, 19 nt, Artificial Sequence
  Synthetic
cugaggaaguggaucaaga

SEQ ID NO: 852 - RNA, 19 nt, Artificial Sequence
  Synthetic
cagucagugggaagaaaua

SEQ ID NO: 853 - RNA, 19 nt, Artificial Sequence
  Synthetic
ggaagaaauacugaagcaa

SEQ ID NO: 854 - RNA, 19 nt, Artificial Sequence
  Synthetic
acucacaauuauaggggaa

SEQ ID NO: 855 - RNA, 19 nt, Artificial Sequence
  Synthetic
uugagaggcugaagcagaa

SEQ ID NO: 856 - RNA, 19 nt, Artificial Sequence
  Synthetic
ggaagaagaagaagaagaa

SEQ ID NO: 857 - RNA, 19 nt, Artificial Sequence
  Synthetic
ggaugaagaaggaggaaga

SEQ ID NO: 858 - RNA, 19 nt, Artificial Sequence
  Synthetic
gugaaacaauggaagaaua

SEQ ID NO: 859 - RNA, 19 nt, Artificial Sequence
  Synthetic
gguuaucgguucagcguua

SEQ ID NO: 860 - RNA, 19 nt, Artificial Sequence
  Synthetic
gggcagaugaguaacgaaa

SEQ ID NO: 861 - RNA, 19 nt, Artificial Sequence
  Synthetic
agaagaagaagaagaagaa

SEQ ID NO: 862 - RNA, 19 nt, Artificial Sequence
  Synthetic
uguauaaggugcaaugaua

SEQ ID NO: 863 - RNA, 19 nt, Artificial Sequence
  Synthetic
ggaggaagaagaagaagaa

SEQ ID NO: 864 - RNA, 19 nt, Artificial Sequence
  Synthetic
cauaguaagugaugguaau

SEQ ID NO: 865 - RNA, 19 nt, Artificial Sequence
  Synthetic
gaagaaagucccaaggaga

SEQ ID NO: 866 - RNA, 19 nt, Artificial Sequence
  Synthetic
aggaagaagaagaagaaga

SEQ ID NO: 867 - RNA, 19 nt, Artificial Sequence
  Synthetic
agaauaaauugcagacuga

SEQ ID NO: 868 - RNA, 19 nt, Artificial Sequence
  Synthetic
gaauggugguucauaguaa

SEQ ID NO: 869 - RNA, 19 nt, Artificial Sequence
  Synthetic
ugggacagguauagauuua

SEQ ID NO: 870 - RNA, 19 nt, Artificial Sequence
  Synthetic
ggagggagacagugaagua

SEQ ID NO: 871 - RNA, 19 nt, Artificial Sequence
  Synthetic
gcagaugaguaacgaaaga

SEQ ID NO: 872 - RNA, 19 nt, Artificial Sequence
  Synthetic
ugaagaaggaggaagaaga

SEQ ID NO: 873 - RNA, 19 nt, Artificial Sequence
  Synthetic
aagaagaagaagaagaaga

SEQ ID NO: 874 - RNA, 19 nt, Artificial Sequence
  Synthetic
gaagaaggaggaagaagaa

SEQ ID NO: 875 - RNA, 19 nt, Artificial Sequence
  Synthetic
caauauagugggucuguaa

SEQ ID NO: 876 - RNA, 19 nt, Artificial Sequence
  Synthetic
aagaauguguggaguguuu

SEQ ID NO: 877 - RNA, 19 nt, Artificial Sequence
  Synthetic
caucaggagcaauuagaua

SEQ ID NO: 878 - RNA, 19 nt, Artificial Sequence
  Synthetic
aagguaaguugcugauuaa

SEQ ID NO: 879 - RNA, 19 nt, Artificial Sequence
  Synthetic
ccuagagccuuaauaguua

SEQ ID NO: 880 - RNA, 19 nt, Artificial Sequence
  Synthetic
aacuacagguugaaggaua

SEQ ID NO: 881 - RNA, 19 nt, Artificial Sequence
  Synthetic
cauuaggaguguucagcua

SEQ ID NO: 882 - RNA, 19 nt, Artificial Sequence
  Synthetic
gaauauuaucggaugaaga

SEQ ID NO: 883 - RNA, 19 nt, Artificial Sequence
  Synthetic
gggagacagugaaguaauu

SEQ ID NO: 884 - RNA, 19 nt, Artificial Sequence
  Synthetic
agaaggaggaagaagaaga

SEQ ID NO: 885 - RNA, 19 nt, Artificial Sequence
  Synthetic
cgguguggaacgaggagaa

SEQ ID NO: 886 - RNA, 19 nt, Artificial Sequence
  Synthetic
aaaccaaggaggaaagaua

SEQ ID NO: 887 - RNA, 19 nt, Artificial Sequence
  Synthetic
gaugagagacccaaagcaa

SEQ ID NO: 888 - RNA, 19 nt, Artificial Sequence
  Synthetic
gugacaagauagcuauuua

SEQ ID NO: 889 - RNA, 19 nt, Artificial Sequence
  Synthetic
cagaagacagacuggacaa

SEQ ID NO: 890 - RNA, 19 nt, Artificial Sequence
  Synthetic
auacgauguucaagagaga

SEQ ID NO: 891 - RNA, 19 nt, Artificial Sequence
  Synthetic
agagacauccaaagggcaa

SEQ ID NO: 892 - RNA, 19 nt, Artificial Sequence
  Synthetic
uuucauaccagguguguuu

SEQ ID NO: 893 - RNA, 19 nt, Artificial Sequence
  Synthetic
cgaaaaggauggugacaag

SEQ ID NO: 894 - RNA, 19 nt, Artificial Sequence
  Synthetic
ugacauugcucagggauga

SEQ ID NO: 895 - RNA, 19 nt, Artificial Sequence
  Synthetic
aaagaagccuagaaaggga

SEQ ID NO: 896 - RNA, 19 nt, Artificial Sequence
  Synthetic
gaauguugagucagaccaa

SEQ ID NO: 897 - RNA, 19 nt, Artificial Sequence
  Synthetic
acccaaagcaaucguggaa

SEQ ID NO: 898 - RNA, 19 nt, Artificial Sequence
  Synthetic
uuucagaccaguucauuaa

SEQ ID NO: 899 - RNA, 19 nt, Artificial Sequence
  Synthetic
acgauguucaagagagaca

SEQ ID NO: 900 - RNA, 19 nt, Artificial Sequence
  Synthetic
aggcaaagcuacagguuua

SEQ ID NO: 901 - RNA, 19 nt, Artificial Sequence
  Synthetic
ggaaagaucccuauggaaa

SEQ ID NO: 902 - RNA, 19 nt, Artificial Sequence
  Synthetic
ccaugaagccgaugagaaa

SEQ ID NO: 903 - RNA, 19 nt, Artificial Sequence
  Synthetic
aaacaacgcugcagauuua

SEQ ID NO: 904 - RNA, 19 nt, Artificial Sequence
  Synthetic
gagaauuggugcugcagaa

SEQ ID NO: 905 - RNA, 19 nt, Artificial Sequence
  Synthetic
ccaaaagccuauugaacaa

SEQ ID NO: 906 - RNA, 19 nt, Artificial Sequence
  Synthetic
gcaugacaacauagaaaua

SEQ ID NO: 907 - RNA, 19 nt, Artificial Sequence
  Synthetic
gagaagaggcaaagcuaca

SEQ ID NO: 908 - RNA, 19 nt, Artificial Sequence
  Synthetic
gggaugaggaucagcacaa

SEQ ID NO: 909 - RNA, 19 nt, Artificial Sequence
  Synthetic
gacaaauggucuuagaauu

SEQ ID NO: 910 - RNA, 19 nt, Artificial Sequence
  Synthetic
gggagaagaggcaaagcua

SEQ ID NO: 911 - RNA, 19 nt, Artificial Sequence
  Synthetic
ccuguuuguuugagguuua

SEQ ID NO: 912 - RNA, 19 nt, Artificial Sequence
  Synthetic
gaagagaucuauacccuaa

SEQ ID NO: 913 - RNA, 19 nt, Artificial Sequence
  Synthetic
ggaaugaacuucuuuggaa

SEQ ID NO: 914 - RNA, 19 nt, Artificial Sequence
  Synthetic
caggagaucauuaagauua

SEQ ID NO: 915 - RNA, 19 nt, Artificial Sequence
  Synthetic
ccagaaugggacacgguaa

SEQ ID NO: 916 - RNA, 19 nt, Artificial Sequence
  Synthetic
gaugagaaaccucguguua

SEQ ID NO: 917 - RNA, 19 nt, Artificial Sequence
  Synthetic
gcagauagcaaagaagaua

SEQ ID NO: 918 - RNA, 19 nt, Artificial Sequence
  Synthetic
gcacaaacaucuccacuuu

SEQ ID NO: 919 - RNA, 19 nt, Artificial Sequence
  Synthetic
gaaagaucccuauggaaaa

SEQ ID NO: 920 - RNA, 19 nt, Artificial Sequence
  Synthetic
acaagaaacggaaggcauu

SEQ ID NO: 921 - RNA, 19 nt, Artificial Sequence
  Synthetic
ggauggcggugucaagaaa

SEQ ID NO: 922 - RNA, 19 nt, Artificial Sequence
  Synthetic
ccagagaguacuacaguga

SEQ ID NO: 923 - RNA, 19 nt, Artificial Sequence
  Synthetic
ccgucaagcuggcugauuu

SEQ ID NO: 924 - RNA, 19 nt, Artificial Sequence
  Synthetic
aaugaaaccuugaacugaa

SEQ ID NO: 925 - RNA, 19 nt, Artificial Sequence
  Synthetic
ccgcaggugugugaagaaa

SEQ ID NO: 926 - RNA, 19 nt, Artificial Sequence
  Synthetic
acaaauggucuuagaauuc

SEQ ID NO: 927 - RNA, 19 nt, Artificial Sequence
  Synthetic
gcuaaugucagcaucuaua

SEQ ID NO: 928 - RNA, 19 nt, Artificial Sequence
  Synthetic
ugagaaaccucguguuagu

SEQ ID NO: 929 - RNA, 19 nt, Artificial Sequence
  Synthetic
uuacagaacagcugauuga

SEQ ID NO: 930 - RNA, 19 nt, Artificial Sequence
  Synthetic
uggcaaugguguacagaua

SEQ ID NO: 931 - RNA, 19 nt, Artificial Sequence
  Synthetic
ggaacgauuuggagaggua

SEQ ID NO: 932 - RNA, 19 nt, Artificial Sequence
  Synthetic
guaagaagcuuuuccauaa

SEQ ID NO: 933 - RNA, 19 nt, Artificial Sequence
  Synthetic
ggaacgauuuggagaggau

SEQ ID NO: 934 - RNA, 19 nt, Artificial Sequence
  Synthetic
ggacauugauagccuguua

SEQ ID NO: 935 - RNA, 19 nt, Artificial Sequence
  Synthetic
agacaaacuacgugccuua

SEQ ID NO: 936 - RNA, 19 nt, Artificial Sequence
  Synthetic
cagaugauccagagaacaa

SEQ ID NO: 937 - RNA, 19 nt, Artificial Sequence
  Synthetic
gaaauuacccugagcucaa

SEQ ID NO: 938 - RNA, 19 nt, Artificial Sequence
  Synthetic
guuuacacaugcugaaaua

SEQ ID NO: 939 - RNA, 19 nt, Artificial Sequence
  Synthetic
cauuugauguggaugaaua

SEQ ID NO: 940 - RNA, 19 nt, Artificial Sequence
  Synthetic
accaagaaguggauguaua

SEQ ID NO: 941 - RNA, 19 nt, Artificial Sequence
  Synthetic
aaagaagacaccagaagaa

SEQ ID NO: 942 - RNA, 19 nt, Artificial Sequence
  Synthetic
gaaacuauguuauggagau

SEQ ID NO: 943 - RNA, 19 nt, Artificial Sequence
  Synthetic
gcugcaaacuaaacaagaa

SEQ ID NO: 944 - RNA, 19 nt, Artificial Sequence
  Synthetic
gggauuacaacauggauuu

SEQ ID NO: 945 - RNA, 19 nt, Artificial Sequence
  Synthetic
gaaguaagggagaaaguuu

SEQ ID NO: 946 - RNA, 19 nt, Artificial Sequence
  Synthetic
aagaagcagaggaaagaaa

SEQ ID NO: 947 - RNA, 19 nt, Artificial Sequence
  Synthetic
aggauaacuuagaagauga

SEQ ID NO: 948 - RNA, 19 nt, Artificial Sequence
  Synthetic
ggaaucauguugacaguuu

SEQ ID NO: 949 - RNA, 19 nt, Artificial Sequence
  Synthetic
acuuuaaggaauagaccaa

SEQ ID NO: 950 - RNA, 19 nt, Artificial Sequence
  Synthetic
gcaaugguguacagauauu

SEQ ID NO: 951 - RNA, 19 nt, Artificial Sequence
  Synthetic
cugcaaacuaaacaagaaa

SEQ ID NO: 952 - RNA, 19 nt, Artificial Sequence
  Synthetic
agaagaugaugauguggaa

SEQ ID NO: 953 - RNA, 19 nt, Artificial Sequence
  Synthetic
cagaaagggauuacaacau

SEQ ID NO: 954 - RNA, 19 nt, Artificial Sequence
  Synthetic
ccaagaaguggauguauau

SEQ ID NO: 955 - RNA, 19 nt, Artificial Sequence
  Synthetic
gcaaaauugagaaugguua

SEQ ID NO: 956 - RNA, 19 nt, Artificial Sequence
  Synthetic
gcauuuaggucagaugaua

SEQ ID NO: 957 - RNA, 19 nt, Artificial Sequence
  Synthetic
ucauacaguuugucaagaa

SEQ ID NO: 958 - RNA, 19 nt, Artificial Sequence
  Synthetic
gcaagaagcagaggaaaga

SEQ ID NO: 959 - RNA, 19 nt, Artificial Sequence
  Synthetic
gcuaaguaguucucuguau

SEQ ID NO: 960 - RNA, 19 nt, Artificial Sequence
  Synthetic
uggcaaugguuuacagaua

SEQ ID NO: 961 - RNA, 19 nt, Artificial Sequence
  Synthetic
cagaaagggugcaaacaaa

SEQ ID NO: 962 - RNA, 19 nt, Artificial Sequence
  Synthetic
cagaagaagcauauagaau

SEQ ID NO: 963 - RNA, 19 nt, Artificial Sequence
  Synthetic
cagcauagauaaugaacuu

SEQ ID NO: 964 - RNA, 19 nt, Artificial Sequence
  Synthetic
gaccagagcugaaggaaga

SEQ ID NO: 965 - RNA, 19 nt, Artificial Sequence
  Synthetic
cgaaaucaauggagugaca

SEQ ID NO: 966 - RNA, 19 nt, Artificial Sequence
  Synthetic
ggagagaagauaacauuua

SEQ ID NO: 967 - RNA, 19 nt, Artificial Sequence
  Synthetic
ggauaauaccagaccgauu

SEQ ID NO: 968 - RNA, 19 nt, Artificial Sequence
  Synthetic
ucacaaaacuggaagaaau

SEQ ID NO: 969 - RNA, 19 nt, Artificial Sequence
  Synthetic
gaacauuccuuuugcuauu

SEQ ID NO: 970 - RNA, 19 nt, Artificial Sequence
  Synthetic
guacagugaugaugacgaa

SEQ ID NO: 971 - RNA, 19 nt, Artificial Sequence
  Synthetic
gaauugaugugcugcuaaa

SEQ ID NO: 972 - RNA, 19 nt, Artificial Sequence
  Synthetic
ggaaaugaauaggcacaaa

SEQ ID NO: 973 - RNA, 19 nt, Artificial Sequence
  Synthetic
ccagaaagggugcaaacaa

SEQ ID NO: 974 - RNA, 19 nt, Artificial Sequence
  Synthetic
gcuacaucaugaagcauua

SEQ ID NO: 975 - RNA, 19 nt, Artificial Sequence
  Synthetic
gaauugaugugcugccaaa

SEQ ID NO: 976 - RNA, 19 nt, Artificial Sequence
  Synthetic
gcagacuacucuucaauaa

SEQ ID NO: 977 - RNA, 19 nt, Artificial Sequence
  Synthetic
guaaacaguaagugcaauu

SEQ ID NO: 978 - RNA, 19 nt, Artificial Sequence
  Synthetic
cuaaaacagucuugcguua

SEQ ID NO: 979 - RNA, 19 nt, Artificial Sequence
  Synthetic
acacagaaaccacgaggua

SEQ ID NO: 980 - RNA, 19 nt, Artificial Sequence
  Synthetic
ccauuugauuggcagguua

SEQ ID NO: 981 - RNA, 19 nt, Artificial Sequence
  Synthetic
gcauggacuugcugaucaa

SEQ ID NO: 982 - RNA, 19 nt, Artificial Sequence
  Synthetic
aagcaaacauagcccauua

SEQ ID NO: 983 - RNA, 19 nt, Artificial Sequence
  Synthetic
cagaucugcuucaaggaaa

SEQ ID NO: 984 - RNA, 19 nt, Artificial Sequence
  Synthetic
cccaaauaaugucggcuua

SEQ ID NO: 985 - RNA, 19 nt, Artificial Sequence
  Synthetic
uaaagaaggcaaugcagua

SEQ ID NO: 986 - RNA, 19 nt, Artificial Sequence
  Synthetic
cauaagaagugggugguuu

SEQ ID NO: 987 - RNA, 19 nt, Artificial Sequence
  Synthetic
gagcauaugaacuguguga

SEQ ID NO: 988 - RNA, 19 nt, Artificial Sequence
  Synthetic
caaaagcaauaaagaggaa

SEQ ID NO: 989 - RNA, 19 nt, Artificial Sequence
  Synthetic
aaaccuuaguacucagaua

SEQ ID NO: 990 - RNA, 19 nt, Artificial Sequence
  Synthetic
gagaagagcaagagggaga

SEQ ID NO: 991 - RNA, 19 nt, Artificial Sequence
  Synthetic
gggcagugauuaugagcaa

SEQ ID NO: 992 - RNA, 19 nt, Artificial Sequence
  Synthetic
gagagaaucugaagaauga

SEQ ID NO: 993 - RNA, 19 nt, Artificial Sequence
  Synthetic
ucauacaguugcugggaaa

SEQ ID NO: 994 - RNA, 19 nt, Artificial Sequence
  Synthetic
gcagagaaacuuaagcaaa

SEQ ID NO: 995 - RNA, 19 nt, Artificial Sequence
  Synthetic
aagaagagguugaagacuu

SEQ ID NO: 996 - RNA, 19 nt, Artificial Sequence
  Synthetic
aguacaaagaggaggaaga

SEQ ID NO: 997 - RNA, 19 nt, Artificial Sequence
  Synthetic
aaaugaagccuuugaguuu

SEQ ID NO: 998 - RNA, 19 nt, Artificial Sequence
  Synthetic
ccagaugagaacaaggaaa

SEQ ID NO: 999 - RNA, 19 nt, Artificial Sequence
  Synthetic
aagaagaccugaagaaguu

SEQ ID NO: 1000 - RNA, 19 nt, Artificial Sequence
  Synthetic
uuaaagaagaccugaagaa

SEQ ID NO: 1001 - RNA, 19 nt, Artificial Sequence
  Synthetic
acaguaaucugcagagaau

SEQ ID NO: 1002 - RNA, 19 nt, Artificial Sequence
  Synthetic
agagaaguuuacacagaaa

SEQ ID NO: 1003 - RNA, 19 nt, Artificial Sequence
  Synthetic
gcacauggaagaagagguu

SEQ ID NO: 1004 - RNA, 19 nt, Artificial Sequence
  Synthetic
ccauuggacaguaaagaaa

SEQ ID NO: 1005 - RNA, 19 nt, Artificial Sequence
  Synthetic
aggugaagaacaacaguaa

SEQ ID NO: 1006 - RNA, 19 nt, Artificial Sequence
  Synthetic
cagaugagaacaaggaaaa

SEQ ID NO: 1007 - RNA, 19 nt, Artificial Sequence
  Synthetic
gaguuuaagaagccaguaa

SEQ ID NO: 1008 - RNA, 19 nt, Artificial Sequence
  Synthetic
guagagaaguuuacacaga

SEQ ID NO: 1009 - RNA, 19 nt, Artificial Sequence
  Synthetic
ugaaagagauagcagugaa

SEQ ID NO: 1010 - RNA, 19 nt, Artificial Sequence
  Synthetic
agagagaucgccuggguaa

SEQ ID NO: 1011 - RNA, 19 nt, Artificial Sequence
  Synthetic
ggaaacaucaggauuuaaa

SEQ ID NO: 1012 - RNA, 19 nt, Artificial Sequence
  Synthetic
ggaaguacaaagaggagga

SEQ ID NO: 1013 - RNA, 19 nt, Artificial Sequence
  Synthetic
cacuggaggugaagaacaa

SEQ ID NO: 1014 - RNA, 19 nt, Artificial Sequence
  Synthetic
gggcaggggagaagagcaa

SEQ ID NO: 1015 - RNA, 19 nt, Artificial Sequence
  Synthetic
uggaagaagagguugaaga

SEQ ID NO: 1016 - RNA, 19 nt, Artificial Sequence
  Synthetic
uugagaacauuuuggacaa

SEQ ID NO: 1017 - RNA, 19 nt, Artificial Sequence
  Synthetic
cagagaaacuuaagcaaag

SEQ ID NO: 1018 - RNA, 19 nt, Artificial Sequence
  Synthetic
ccucagaagcuguugggau

SEQ ID NO: 1019 - RNA, 19 nt, Artificial Sequence
  Synthetic
gguaugugagagagagaga

SEQ ID NO: 1020 - RNA, 19 nt, Artificial Sequence
  Synthetic
uggaaaaggaagaggaaaa

SEQ ID NO: 1021 - RNA, 19 nt, Artificial Sequence
  Synthetic
gggaagacaaggagaauga

SEQ ID NO: 1022 - RNA, 19 nt, Artificial Sequence
  Synthetic
ucaauaaagcacugagcaa

SEQ ID NO: 1023 - RNA, 19 nt, Artificial Sequence
  Synthetic
ucagcaacaucguggauaa

SEQ ID NO: 1024 - RNA, 19 nt, Artificial Sequence
  Synthetic
gggaagacaaggagaaugu

SEQ ID NO: 1025 - RNA, 19 nt, Artificial Sequence
  Synthetic
ugaggaagaugauggauuu

SEQ ID NO: 1026 - RNA, 19 nt, Artificial Sequence
  Synthetic
gcacugagcaaguugagaa

SEQ ID NO: 1027 - RNA, 19 nt, Artificial Sequence
  Synthetic
gcagauaccccuaugaaua

SEQ ID NO: 1028 - RNA, 19 nt, Artificial Sequence
  Synthetic
ggaagauggaaguggagga

SEQ ID NO: 1029 - RNA, 19 nt, Artificial Sequence
  Synthetic
cagaaagggauguuauuau

SEQ ID NO: 1030 - RNA, 19 nt, Artificial Sequence
  Synthetic
cauccuagagagugacuua

SEQ ID NO: 1031 - RNA, 19 nt, Artificial Sequence
  Synthetic
uggacauccuagagaguga

SEQ ID NO: 1032 - RNA, 19 nt, Artificial Sequence
  Synthetic
gcucccagggcaaggguua

SEQ ID NO: 1033 - RNA, 19 nt, Artificial Sequence
  Synthetic
acaaggagaaugauggauu

SEQ ID NO: 1034 - RNA, 19 nt, Artificial Sequence
  Synthetic
aggaugagcuaaagaccuu

SEQ ID NO: 1035 - RNA, 19 nt, Artificial Sequence
  Synthetic
uggauaaguuugugauugu

SEQ ID NO: 1036 - RNA, 19 nt, Artificial Sequence
  Synthetic
caaggagaaugauggauuu

SEQ ID NO: 1037 - RNA, 19 nt, Artificial Sequence
  Synthetic
cugaggaagaugauggauu

SEQ ID NO: 1038 - RNA, 19 nt, Artificial Sequence
  Synthetic
ggucagagcuaaacuccuu

SEQ ID NO: 1039 - RNA, 19 nt, Artificial Sequence
  Synthetic
gcaacaucguggauaaguu

SEQ ID NO: 1040 - RNA, 19 nt, Artificial Sequence
  Synthetic
ccaugaaccacgaggccuu

SEQ ID NO: 1041 - RNA, 19 nt, Artificial Sequence
  Synthetic
agagugacuuaaaggauga

SEQ ID NO: 1042 - RNA, 19 nt, Artificial Sequence
  Synthetic
cuuaaaggaugaugaugca

SEQ ID NO: 1043 - RNA, 19 nt, Artificial Sequence
  Synthetic
acaucaagacugcggugaa

SEQ ID NO: 1044 - RNA, 19 nt, Artificial Sequence
  Synthetic
ucuacuacccugagaugua

SEQ ID NO: 1045 - RNA, 19 nt, Artificial Sequence
  Synthetic
ggagauuacucuaaggccu

SEQ ID NO: 1046 - RNA, 19 nt, Artificial Sequence
  Synthetic
agauggaaguggaggagcu

SEQ ID NO: 1047 - RNA, 19 nt, Artificial Sequence
  Synthetic
agcccagucuguugaguua

SEQ ID NO: 1048 - RNA, 19 nt, Artificial Sequence
  Synthetic
aaguacaucucaccagaaa

SEQ ID NO: 1049 - RNA, 19 nt, Artificial Sequence
  Synthetic
cagcuuaaaggcaguauuu

SEQ ID NO: 1050 - RNA, 19 nt, Artificial Sequence
  Synthetic
gcagaaacccugagcagaa

SEQ ID NO: 1051 - RNA, 19 nt, Artificial Sequence
  Synthetic
caacacaauaccagauaaa

SEQ ID NO: 1052 - RNA, 19 nt, Artificial Sequence
  Synthetic
gggcaaauuucuuggugau

SEQ ID NO: 1053 - RNA, 19 nt, Artificial Sequence
  Synthetic
ccacagagcuacugcccua

SEQ ID NO: 1054 - RNA, 19 nt, Artificial Sequence
  Synthetic
ugaaagaucaagaagcaaa

SEQ ID NO: 1055 - RNA, 19 nt, Artificial Sequence
  Synthetic
aggaagggcuuauguuuaa

SEQ ID NO: 1056 - RNA, 19 nt, Artificial Sequence
  Synthetic
ccugaaagaucaagaagca

SEQ ID NO: 1057 - RNA, 19 nt, Artificial Sequence
  Synthetic
gcucagaggccguaacuuu

SEQ ID NO: 1058 - RNA, 19 nt, Artificial Sequence
  Synthetic
aggaagaacuguuuaacuu

SEQ ID NO: 1059 - RNA, 19 nt, Artificial Sequence
  Synthetic
gaaacuugguggacaguga

SEQ ID NO: 1060 - RNA, 19 nt, Artificial Sequence
  Synthetic
cagaagagauuucagauga

SEQ ID NO: 1061 - RNA, 19 nt, Artificial Sequence
  Synthetic
gaagcaaaggugagcagaa

SEQ ID NO: 1062 - RNA, 19 nt, Artificial Sequence
  Synthetic
gagcagaaguggccuauau

SEQ ID NO: 1063 - RNA, 19 nt, Artificial Sequence
  Synthetic
cgucgaugccagagaacuu

SEQ ID NO: 1064 - RNA, 19 nt, Artificial Sequence
  Synthetic
agaccaggcagaagagauu

SEQ ID NO: 1065 - RNA, 19 nt, Artificial Sequence
  Synthetic
caggaagggcuuauguuua

SEQ ID NO: 1066 - RNA, 19 nt, Artificial Sequence
  Synthetic
cagaugaauuaauggaguu

SEQ ID NO: 1067 - RNA, 19 nt, Artificial Sequence
  Synthetic
uguacuacccagagcuaua

SEQ ID NO: 1068 - RNA, 19 nt, Artificial Sequence
  Synthetic
gacugaagcagguggaaaa

SEQ ID NO: 1069 - RNA, 19 nt, Artificial Sequence
  Synthetic
gagaagaccaggcagaaga

SEQ ID NO: 1070 - RNA, 19 nt, Artificial Sequence
  Synthetic
ccagggagccuuaaacuua

SEQ ID NO: 1071 - RNA, 19 nt, Artificial Sequence
  Synthetic
cucagaugcuggaggaaga

SEQ ID NO: 1072 - RNA, 19 nt, Artificial Sequence
  Synthetic
gguggacagugaaaugaaa

SEQ ID NO: 1073 - RNA, 19 nt, Artificial Sequence
  Synthetic
uggacagugaaaugaaaua

SEQ ID NO: 1074 - RNA, 19 nt, Artificial Sequence
  Synthetic
gaucaagaagcaaagguga

SEQ ID NO: 1075 - RNA, 19 nt, Artificial Sequence
  Synthetic
acacaauaccagauaaagu

SEQ ID NO: 1076 - RNA, 19 nt, Artificial Sequence
  Synthetic
cuagaacuccagugggcaa

SEQ ID NO: 1077 - RNA, 19 nt, Artificial Sequence
  Synthetic
gggcuuauguuuaaagaag

SEQ ID NO: 1078 - RNA, 19 nt, Artificial Sequence
  Synthetic
aggucuaaucaaaggaaaa

SEQ ID NO: 1079 - RNA, 19 nt, Artificial Sequence
  Synthetic
gcauuuagcugggaugaau

SEQ ID NO: 1080 - RNA, 19 nt, Artificial Sequence
  Synthetic
acuaaagagcugugguaua

SEQ ID NO: 1081 - RNA, 19 nt, Artificial Sequence
  Synthetic
ccaucaagcaauacaauua

SEQ ID NO: 1082 - RNA, 19 nt, Artificial Sequence
  Synthetic
ugucaguucucuagcauaa

SEQ ID NO: 1083 - RNA, 19 nt, Artificial Sequence
  Synthetic
gaacuaaagagcuguggua

SEQ ID NO: 1084 - RNA, 19 nt, Artificial Sequence
  Synthetic
caaauuagcugcacaucua

SEQ ID NO: 1085 - RNA, 19 nt, Artificial Sequence
  Synthetic
ugaaauaauggaagagcuu

SEQ ID NO: 1086 - RNA, 19 nt, Artificial Sequence
  Synthetic
gcagauauuccuaaaguuu

SEQ ID NO: 1087 - RNA, 19 nt, Artificial Sequence
  Synthetic
cacaauaucaccagagcaa

SEQ ID NO: 1088 - RNA, 19 nt, Artificial Sequence
  Synthetic
cuucaugaguuucgggaca

SEQ ID NO: 1089 - RNA, 19 nt, Artificial Sequence
  Synthetic
ggacaaauuagcugcacau

SEQ ID NO: 1090 - RNA, 19 nt, Artificial Sequence
  Synthetic
aaugaaaccaccaguguua

SEQ ID NO: 1091 - RNA, 19 nt, Artificial Sequence
  Synthetic
cagaagaacuaaagagcug

SEQ ID NO: 1092 - RNA, 19 nt, Artificial Sequence
  Synthetic
gcugugaaauaauggaaga

SEQ ID NO: 1093 - RNA, 19 nt, Artificial Sequence
  Synthetic
gaacagacuccaauucaua

SEQ ID NO: 1094 - RNA, 19 nt, Artificial Sequence
  Synthetic
cuauggaggacuugggaga

SEQ ID NO: 1095 - RNA, 19 nt, Artificial Sequence
  Synthetic
cuuccagguuguaaauuua

SEQ ID NO: 1096 - RNA, 19 nt, Artificial Sequence
  Synthetic
gggacaaauuagcugcaca

SEQ ID NO: 1097 - RNA, 19 nt, Artificial Sequence
  Synthetic
ugaagagccuauugaagau

SEQ ID NO: 1098 - RNA, 19 nt, Artificial Sequence
  Synthetic
augaagagccuauugaaga

SEQ ID NO: 1099 - RNA, 19 nt, Artificial Sequence
  Synthetic
gggcaauacagaccaucaa

SEQ ID NO: 1100 - RNA, 19 nt, Artificial Sequence
  Synthetic
ccauagacagccugcgaga

SEQ ID NO: 1101 - RNA, 19 nt, Artificial Sequence
  Synthetic
ccgcccaguucaauacaaa

SEQ ID NO: 1102 - RNA, 19 nt, Artificial Sequence
  Synthetic
gagcuuacaaccugccuua

SEQ ID NO: 1103 - RNA, 19 nt, Artificial Sequence
  Synthetic
gugaaauaauggaagagcu

SEQ ID NO: 1104 - RNA, 19 nt, Artificial Sequence
  Synthetic
uguuagaagaaauguccaa

SEQ ID NO: 1105 - RNA, 19 nt, Artificial Sequence
  Synthetic
cuaccagcaauguggaauu

SEQ ID NO: 1106 - RNA, 19 nt, Artificial Sequence
  Synthetic
cugcgagaccuaagaggau

SEQ ID NO: 1107 - RNA, 19 nt, Artificial Sequence
  Synthetic
cugugguauacaagacaua

SEQ ID NO: 1108 - RNA, 19 nt, Artificial Sequence
  Synthetic
gcuuacaaccugccuuaaa

SEQ ID NO: 1109 - RNA, 19 nt, Artificial Sequence
  Synthetic
auacagaccaucaagcaau

SEQ ID NO: 1110 - RNA, 19 nt, Artificial Sequence
  Synthetic
gcacauauccacagugaaa

SEQ ID NO: 1111 - RNA, 19 nt, Artificial Sequence
  Synthetic
acauauaaaugguggugaa

SEQ ID NO: 1112 - RNA, 19 nt, Artificial Sequence
  Synthetic
ggccaaagccgauggaauu

SEQ ID NO: 1113 - RNA, 19 nt, Artificial Sequence
  Synthetic
ccagaaucaugaagagcaa

SEQ ID NO: 1114 - RNA, 19 nt, Artificial Sequence
  Synthetic
gugcagggcagcaggauaa

SEQ ID NO: 1115 - RNA, 19 nt, Artificial Sequence
  Synthetic
ucuacaagcaugagagcaa

SEQ ID NO: 1116 - RNA, 19 nt, Artificial Sequence
  Synthetic
ugaugaacccugagacaaa

SEQ ID NO: 1117 - RNA, 19 nt, Artificial Sequence
  Synthetic
gaaauuggccacugguaaa

SEQ ID NO: 1118 - RNA, 19 nt, Artificial Sequence
  Synthetic
gaaccuuccuggugggcaa

SEQ ID NO: 1119 - RNA, 19 nt, Artificial Sequence
  Synthetic
caagaugcuucgucggaaa

SEQ ID NO: 1120 - RNA, 19 nt, Artificial Sequence
  Synthetic
gaacaaaagagaagacaga

SEQ ID NO: 1121 - RNA, 19 nt, Artificial Sequence
  Synthetic
ggaggaaggugauuucaaa

SEQ ID NO: 1122 - RNA, 19 nt, Artificial Sequence
  Synthetic
aaucaaaggaggaacaaaa

SEQ ID NO: 1123 - RNA, 19 nt, Artificial Sequence
  Synthetic
agaaauuggccacugguaa

SEQ ID NO: 1124 - RNA, 19 nt, Artificial Sequence
  Synthetic
uggccaaagccgauggaau

SEQ ID NO: 1125 - RNA, 19 nt, Artificial Sequence
  Synthetic
gagcuggacugaagacuau

SEQ ID NO: 1126 - RNA, 19 nt, Artificial Sequence
  Synthetic
gugauaaucugaugcugaa

SEQ ID NO: 1127 - RNA, 19 nt, Artificial Sequence
  Synthetic
gcaagcuggugcugaggaa

SEQ ID NO: 1128 - RNA, 19 nt, Artificial Sequence
  Synthetic
ggugaugaacccugagaca

SEQ ID NO: 1129 - RNA, 19 nt, Artificial Sequence
  Synthetic
ggccagaacugcucuaauu

SEQ ID NO: 1130 - RNA, 19 nt, Artificial Sequence
  Synthetic
cuaucuaccuccugaccaa

SEQ ID NO: 1131 - RNA, 19 nt, Artificial Sequence
  Synthetic
caaacugucacuugguuaa

SEQ ID NO: 1132 - RNA, 19 nt, Artificial Sequence
  Synthetic
gggaagugguuggugaaga

SEQ ID NO: 1133 - RNA, 19 nt, Artificial Sequence
  Synthetic
uggaagccauggagaccaa

SEQ ID NO: 1134 - RNA, 19 nt, Artificial Sequence
  Synthetic
caugaggauccacggguua

SEQ ID NO: 1135 - RNA, 19 nt, Artificial Sequence
  Synthetic
gcaaaagcauccugaagau

SEQ ID NO: 1136 - RNA, 19 nt, Artificial Sequence
  Synthetic
gugaggagcacucgggaca

SEQ ID NO: 1137 - RNA, 19 nt, Artificial Sequence
  Synthetic
gagcacauauccacaguga

SEQ ID NO: 1138 - RNA, 19 nt, Artificial Sequence
  Synthetic
cugaagaucacaaagguca

SEQ ID NO: 1139 - RNA, 19 nt, Artificial Sequence
  Synthetic
uggacaggcugcagaaguu

SEQ ID NO: 1140 - RNA, 19 nt, Artificial Sequence
  Synthetic
gggacaagguggaggagca

SEQ ID NO: 1141 - RNA, 19 nt, Artificial Sequence
  Synthetic
acaaagagguggacgacau

SEQ ID NO: 1142 - RNA, 19 nt, Artificial Sequence
  Synthetic
cgacaaacuucccgauaga

SEQ ID NO: 1143 - RNA, 19 nt, Artificial Sequence
  Synthetic
cagacgagaaagaaaguaa

SEQ ID NO: 1144 - RNA, 19 nt, Artificial Sequence
  Synthetic
cgagaaagaaaguaaauca

SEQ ID NO: 1145 - RNA, 19 nt, Artificial Sequence
  Synthetic
cauaauuuucagugggcua

SEQ ID NO: 1146 - RNA, 19 nt, Artificial Sequence
  Synthetic
ucacccaguugcagaguaa

SEQ ID NO: 1147 - RNA, 19 nt, Artificial Sequence
  Synthetic
guaagugacagguguuaaa

SEQ ID NO: 1148 - RNA, 19 nt, Artificial Sequence
  Synthetic
gcauggaggaggaggagga

SEQ ID NO: 1149 - RNA, 19 nt, Artificial Sequence
  Synthetic
ccagaggccacaagaggaa

SEQ ID NO: 1150 - RNA, 19 nt, Artificial Sequence
  Synthetic
ggacgacauccuuggagaa

SEQ ID NO: 1151 - RNA, 19 nt, Artificial Sequence
  Synthetic
ggaugaauguauugaccca

SEQ ID NO: 1152 - RNA, 19 nt, Artificial Sequence
  Synthetic
ucugauaacugugaagaaa

SEQ ID NO: 1153 - RNA, 19 nt, Artificial Sequence
  Synthetic
gcauuauugaugaucgaaa

SEQ ID NO: 1154 - RNA, 19 nt, Artificial Sequence
  Synthetic
agaggaagcugaaugaaga

SEQ ID NO: 1155 - RNA, 19 nt, Artificial Sequence
  Synthetic
agaagacgcgggagcauua

SEQ ID NO: 1156 - RNA, 19 nt, Artificial Sequence
  Synthetic
ccaaaggacauguauauuu

SEQ ID NO: 1157 - RNA, 19 nt, Artificial Sequence
  Synthetic
agacgagaaagaaaguaaa

SEQ ID NO: 1158 - RNA, 19 nt, Artificial Sequence
  Synthetic
ccaaacagauuucucuuua

SEQ ID NO: 1159 - RNA, 19 nt, Artificial Sequence
  Synthetic
aggaggaggaggaggagga

SEQ ID NO: 1160 - RNA, 19 nt, Artificial Sequence
  Synthetic
gagaagaccagcagcgacu

SEQ ID NO: 1161 - RNA, 19 nt, Artificial Sequence
  Synthetic
acaccaaggcacagaggga

SEQ ID NO: 1162 - RNA, 19 nt, Artificial Sequence
  Synthetic
gggcacgggugauaugaau

SEQ ID NO: 1163 - RNA, 19 nt, Artificial Sequence
  Synthetic
cugaggagcaggaggagga

SEQ ID NO: 1164 - RNA, 19 nt, Artificial Sequence
  Synthetic
gagcgguucuggugagguu

SEQ ID NO: 1165 - RNA, 19 nt, Artificial Sequence
  Synthetic
ccgaauauuaucaagggau

SEQ ID NO: 1166 - RNA, 19 nt, Artificial Sequence
  Synthetic
ugaccuggacuuugacuua

SEQ ID NO: 1167 - RNA, 19 nt, Artificial Sequence
  Synthetic
uggaggaggaggaggagga

SEQ ID NO: 1168 - RNA, 19 nt, Artificial Sequence
  Synthetic
cgaauauuaucaagggaug

SEQ ID NO: 1169 - RNA, 19 nt, Artificial Sequence
  Synthetic
cugauaacugugaagaaau

SEQ ID NO: 1170 - RNA, 19 nt, Artificial Sequence
  Synthetic
gggcaaaggugaccagaag

SEQ ID NO: 1171 - RNA, 19 nt, Artificial Sequence
  Synthetic
ggaacuacgugaaggaccu

SEQ ID NO: 1172 - RNA, 19 nt, Artificial Sequence
  Synthetic
gguuugacaacaugaguga

SEQ ID NO: 1173 - RNA, 19 nt, Artificial Sequence
  Synthetic
acacagagcuccacgaccu

SEQ ID NO: 1174 - RNA, 19 nt, Artificial Sequence
  Synthetic
augaguuccugcagcgaau

SEQ ID NO: 1175 - RNA, 19 nt, Artificial Sequence
  Synthetic
ugacaacaugagugacaca

SEQ ID NO: 1176 - RNA, 19 nt, Artificial Sequence
  Synthetic
caucaucccuguggagauu

SEQ ID NO: 1177 - RNA, 19 nt, Artificial Sequence
  Synthetic
gggugcucauccuggacaa

SEQ ID NO: 1178 - RNA, 19 nt, Artificial Sequence
  Synthetic
gggcgagcucuuugaaugu

SEQ ID NO: 1179 - RNA, 19 nt, Artificial Sequence
  Synthetic
cugcuagccucgccaagua

SEQ ID NO: 1180 - RNA, 19 nt, Artificial Sequence
  Synthetic
gcaaaggugaccagaaguc

SEQ ID NO: 1181 - RNA, 19 nt, Artificial Sequence
  Synthetic
gaccagaagucagcagcuu

SEQ ID NO: 1182 - RNA, 19 nt, Artificial Sequence
  Synthetic
cguauaaggaggaagcaaa

SEQ ID NO: 1183 - RNA, 19 nt, Artificial Sequence
  Synthetic
gggagggaccugagaaaga

SEQ ID NO: 1184 - RNA, 19 nt, Artificial Sequence
  Synthetic
cgaugaaacccuugugcau

SEQ ID NO: 1185 - RNA, 19 nt, Artificial Sequence
  Synthetic
caacaaugcugacuucaua

SEQ ID NO: 1186 - RNA, 19 nt, Artificial Sequence
  Synthetic
cagaggugacagaggaaga

SEQ ID NO: 1187 - RNA, 19 nt, Artificial Sequence
  Synthetic
ccuuuaagccaaucaacaa

SEQ ID NO: 1188 - RNA, 19 nt, Artificial Sequence
  Synthetic
gcguauaaggaggaagcaa

SEQ ID NO: 1189 - RNA, 19 nt, Artificial Sequence
  Synthetic
ggugacagaggaagaucaa

SEQ ID NO: 1190 - RNA, 19 nt, Artificial Sequence
  Synthetic
ccacugagcucgcugcgua

SEQ ID NO: 1191 - RNA, 19 nt, Artificial Sequence
  Synthetic
ggaaauuggucaaggacaa

SEQ ID NO: 1192 - RNA, 19 nt, Artificial Sequence
  Synthetic
ccaaauggacugaaagaaa

SEQ ID NO: 1193 - RNA, 19 nt, Artificial Sequence
  Synthetic
uugaagagccugagaguaa

SEQ ID NO: 1194 - RNA, 19 nt, Artificial Sequence
  Synthetic
ggccaaagauucuguuaaa

SEQ ID NO: 1195 - RNA, 19 nt, Artificial Sequence
  Synthetic
acagauacuuggaggcuua

SEQ ID NO: 1196 - RNA, 19 nt, Artificial Sequence
  Synthetic
gcacaggaaugaacugaaa

SEQ ID NO: 1197 - RNA, 19 nt, Artificial Sequence
  Synthetic
ggagaagacugaucacaaa

SEQ ID NO: 1198 - RNA, 19 nt, Artificial Sequence
  Synthetic
gagaaagggugauaaagua

SEQ ID NO: 1199 - RNA, 19 nt, Artificial Sequence
  Synthetic
gggaguaacacuaaagcua

SEQ ID NO: 1200 - RNA, 19 nt, Artificial Sequence
  Synthetic
ggagcaagguggaauguuu

SEQ ID NO: 1201 - RNA, 19 nt, Artificial Sequence
  Synthetic
cacuaaagcuacaagaaau

SEQ ID NO: 1202 - RNA, 19 nt, Artificial Sequence
  Synthetic
gcugcaaagcuaugauaua

SEQ ID NO: 1203 - RNA, 19 nt, Artificial Sequence
  Synthetic
gggcaauuagguaguauaa

SEQ ID NO: 1204 - RNA, 19 nt, Artificial Sequence
  Synthetic
gguaauaauguguuccaaa

SEQ ID NO: 1205 - RNA, 19 nt, Artificial Sequence
  Synthetic
acacuaaagcuacaagaaa

SEQ ID NO: 1206 - RNA, 19 nt, Artificial Sequence
  Synthetic
ggacaguguauuauaacaa

SEQ ID NO: 1207 - RNA, 19 nt, Artificial Sequence
  Synthetic
gcaaauagaagaaugagau

SEQ ID NO: 1208 - RNA, 19 nt, Artificial Sequence
  Synthetic
gguaaaugaagguacaauu

SEQ ID NO: 1209 - RNA, 19 nt, Artificial Sequence
  Synthetic
ccaaagggauaccugauua

SEQ ID NO: 1210 - RNA, 19 nt, Artificial Sequence
  Synthetic
cugcaaagcuaugauauaa

SEQ ID NO: 1211 - RNA, 19 nt, Artificial Sequence
  Synthetic
ggaaugaacugaaauacuu

SEQ ID NO: 1212 - RNA, 19 nt, Artificial Sequence
  Synthetic
agauuaugcugcaaagcua

SEQ ID NO: 1213 - RNA, 19 nt, Artificial Sequence
  Synthetic
ggucguucaucuuuaaaua

SEQ ID NO: 1214 - RNA, 19 nt, Artificial Sequence
  Synthetic
acaggaaugaacugaaaua

SEQ ID NO: 1215 - RNA, 19 nt, Artificial Sequence
  Synthetic
caagauauuacgcuggaaa

SEQ ID NO: 1216 - RNA, 19 nt, Artificial Sequence
  Synthetic
ggucaggaguucaacauca

SEQ ID NO: 1217 - RNA, 19 nt, Artificial Sequence
  Synthetic
uuucaaggacaguguauua

SEQ ID NO: 1218 - RNA, 19 nt, Artificial Sequence
  Synthetic
gaguaacacuaaagcuaca

SEQ ID NO: 1219 - RNA, 19 nt, Artificial Sequence
  Synthetic
aggagaagacugaucacaa

SEQ ID NO: 1220 - RNA, 19 nt, Artificial Sequence
  Synthetic
gggccaaagauucuguuaa

SEQ ID NO: 1221 - RNA, 19 nt, Artificial Sequence
  Synthetic
caaccaagcaacagagaaa

SEQ ID NO: 1222 - RNA, 19 nt, Artificial Sequence
  Synthetic
gaaauuaccaaguggguuu

SEQ ID NO: 1223 - RNA, 19 nt, Artificial Sequence
  Synthetic
gggaagcauuucauggaua

SEQ ID NO: 1224 - RNA, 19 nt, Artificial Sequence
  Synthetic
aagcagaagacuugaauuu

SEQ ID NO: 1225 - RNA, 19 nt, Artificial Sequence
  Synthetic
uaaacgauuaugagggaaa

SEQ ID NO: 1226 - RNA, 19 nt, Artificial Sequence
  Synthetic
aaacagauaccgagauauu

SEQ ID NO: 1227 - RNA, 19 nt, Artificial Sequence
  Synthetic
gagcagagccuguaaacga

SEQ ID NO: 1228 - RNA, 19 nt, Artificial Sequence
  Synthetic
guuaauucagagaagguaa

SEQ ID NO: 1229 - RNA, 19 nt, Artificial Sequence
  Synthetic
gggaaaugacucugaagca

SEQ ID NO: 1230 - RNA, 19 nt, Artificial Sequence
  Synthetic
ggcccaaaugagagaacaa

SEQ ID NO: 1231 - RNA, 19 nt, Artificial Sequence
  Synthetic
gugacaagcuauaccuaau

SEQ ID NO: 1232 - RNA, 19 nt, Artificial Sequence
  Synthetic
gggaaucaaccaagcaaca

SEQ ID NO: 1233 - RNA, 19 nt, Artificial Sequence
  Synthetic
ggugaucaguguuuacuua

SEQ ID NO: 1234 - RNA, 19 nt, Artificial Sequence
  Synthetic
gcucagauucggccauuaa

SEQ ID NO: 1235 - RNA, 19 nt, Artificial Sequence
  Synthetic
gaguguuuguacaguuuaa

SEQ ID NO: 1236 - RNA, 19 nt, Artificial Sequence
  Synthetic
ucaauggagaucagaauau

SEQ ID NO: 1237 - RNA, 19 nt, Artificial Sequence
  Synthetic
aaacgaaggagcaguauca

SEQ ID NO: 1238 - RNA, 19 nt, Artificial Sequence
  Synthetic
gaaaacacaccuagaucaa

SEQ ID NO: 1239 - RNA, 19 nt, Artificial Sequence
  Synthetic
gcgcaaaauuguuucugaa

SEQ ID NO: 1240 - RNA, 19 nt, Artificial Sequence
  Synthetic
gagaacauaaggccaauaa

SEQ ID NO: 1241 - RNA, 19 nt, Artificial Sequence
  Synthetic
ggacuaacuuuggacacaa

SEQ ID NO: 1242 - RNA, 19 nt, Artificial Sequence
  Synthetic
ggcuuuagaacuuaagaau

SEQ ID NO: 1243 - RNA, 19 nt, Artificial Sequence
  Synthetic
agaagagacagguggagca

SEQ ID NO: 1244 - RNA, 19 nt, Artificial Sequence
  Synthetic
uguaaacgauuaugaggga

SEQ ID NO: 1245 - RNA, 19 nt, Artificial Sequence
  Synthetic
gaaaagauguggccauuau

SEQ ID NO: 1246 - RNA, 19 nt, Artificial Sequence
  Synthetic
caaaauaacuucccacauu

SEQ ID NO: 1247 - RNA, 19 nt, Artificial Sequence
  Synthetic
cauuucaacaucauggaua

SEQ ID NO: 1248 - RNA, 19 nt, Artificial Sequence
  Synthetic
caaaauuguuucugaagga

SEQ ID NO: 1249 - RNA, 19 nt, Artificial Sequence
  Synthetic
gggauuacagagcccaaua

SEQ ID NO: 1250 - RNA, 19 nt, Artificial Sequence
  Synthetic
ccgagauauucuuccauuu

SEQ ID NO: 1251 - RNA, 19 nt, Artificial Sequence
  Synthetic
ggugaauagucaagagauu

SEQ ID NO: 1252 - RNA, 19 nt, Artificial Sequence
  Synthetic
ccugaaacuaagaggauua

SEQ ID NO: 1253 - RNA, 19 nt, Artificial Sequence
  Synthetic
ggucagaaguggugggaac

SEQ ID NO: 1254 - RNA, 19 nt, Artificial Sequence
  Synthetic
caagaaauguggugguuuu

SEQ ID NO: 1255 - RNA, 19 nt, Artificial Sequence
  Synthetic
ggaauuaacuucaugguga

SEQ ID NO: 1256 - RNA, 19 nt, Artificial Sequence
  Synthetic
ggauacacuugaugagaga

SEQ ID NO: 1257 - RNA, 19 nt, Artificial Sequence
  Synthetic
ggaaagagcaaaugagaag

SEQ ID NO: 1258 - RNA, 19 nt, Artificial Sequence
  Synthetic
uggcaaacggaaagagaau

SEQ ID NO: 1259 - RNA, 19 nt, Artificial Sequence
  Synthetic
uagcagaaccugaaacuaa

SEQ ID NO: 1260 - RNA, 19 nt, Artificial Sequence
  Synthetic
gacaagaaguauuggagau

SEQ ID NO: 1261 - RNA, 19 nt, Artificial Sequence
  Synthetic
gcaaacggaaagagaauga

SEQ ID NO: 1262 - RNA, 19 nt, Artificial Sequence
  Synthetic
ccacuuagauaguaguuuu

SEQ ID NO: 1263 - RNA, 19 nt, Artificial Sequence
  Synthetic
cuguacauguucaguauaa

SEQ ID NO: 1264 - RNA, 19 nt, Artificial Sequence
  Synthetic
acagauuggcaaacggaaa

SEQ ID NO: 1265 - RNA, 19 nt, Artificial Sequence
  Synthetic
ugaccauacuccagaaaga

SEQ ID NO: 1266 - RNA, 19 nt, Artificial Sequence
  Synthetic
ggagaaauguauuauggau

SEQ ID NO: 1267 - RNA, 19 nt, Artificial Sequence
  Synthetic
gagcaaaugagaagugguu

SEQ ID NO: 1268 - RNA, 19 nt, Artificial Sequence
  Synthetic
ucaagagauuugugacuuu

SEQ ID NO: 1269 - RNA, 19 nt, Artificial Sequence
  Synthetic
aaggagaagaacuuggaaa

SEQ ID NO: 1270 - RNA, 19 nt, Artificial Sequence
  Synthetic
aagaaaggaucaagaaaug

SEQ ID NO: 1271 - RNA, 19 nt, Artificial Sequence
  Synthetic
cugcaguaguagugccuuu

SEQ ID NO: 1272 - RNA, 19 nt, Artificial Sequence
  Synthetic
ggacguagccauccagaga

SEQ ID NO: 1273 - RNA, 19 nt, Artificial Sequence
  Synthetic
cagaugagguccuguacuu

SEQ ID NO: 1274 - RNA, 19 nt, Artificial Sequence
  Synthetic
cagcugggacuuagaguuu

SEQ ID NO: 1275 - RNA, 19 nt, Artificial Sequence
  Synthetic
gaugagagugucacauuaa

SEQ ID NO: 1276 - RNA, 19 nt, Artificial Sequence
  Synthetic
gagaagugguuuggauaca

SEQ ID NO: 1277 - RNA, 19 nt, Artificial Sequence
  Synthetic
ggugaaagcaaccaugcaa

SEQ ID NO: 1278 - RNA, 19 nt, Artificial Sequence
  Synthetic
guaaauggcaggcuugcaa

SEQ ID NO: 1279 - RNA, 19 nt, Artificial Sequence
  Synthetic
acaagaaguauuggagauu

SEQ ID NO: 1280 - RNA, 19 nt, Artificial Sequence
  Synthetic
agaugagagugucacauua

SEQ ID NO: 1281 - RNA, 19 nt, Artificial Sequence
  Synthetic
gagaagaacuuaucagaga

SEQ ID NO: 1282 - RNA, 19 nt, Artificial Sequence
  Synthetic
cagaagaacaagccagaaa

SEQ ID NO: 1283 - RNA, 19 nt, Artificial Sequence
  Synthetic
agaagauggagaaggaaua

SEQ ID NO: 1284 - RNA, 19 nt, Artificial Sequence
  Synthetic
caacauuguaggaggagaa

SEQ ID NO: 1285 - RNA, 19 nt, Artificial Sequence
  Synthetic
ggagaugacucaaguauuu

SEQ ID NO: 1286 - RNA, 19 nt, Artificial Sequence
  Synthetic
gcccuaguguagagaaaua

SEQ ID NO: 1287 - RNA, 19 nt, Artificial Sequence
  Synthetic
caagauacccagagagcau

SEQ ID NO: 1288 - RNA, 19 nt, Artificial Sequence
  Synthetic
gcgucuaacagaagaacaa

SEQ ID NO: 1289 - RNA, 19 nt, Artificial Sequence
  Synthetic
acuucagauuggagauaaa

SEQ ID NO: 1290 - RNA, 19 nt, Artificial Sequence
  Synthetic
agaacaaggaccagaguga

SEQ ID NO: 1291 - RNA, 19 nt, Artificial Sequence
  Synthetic
gaauaagcgucuaacagaa

SEQ ID NO: 1292 - RNA, 19 nt, Artificial Sequence
  Synthetic
agaaguuacucaugaagaa

SEQ ID NO: 1293 - RNA, 19 nt, Artificial Sequence
  Synthetic
ccuaugaaagacaggauaa

SEQ ID NO: 1294 - RNA, 19 nt, Artificial Sequence
  Synthetic
gaaacagaucauagaagaa

SEQ ID NO: 1295 - RNA, 19 nt, Artificial Sequence
  Synthetic
gagaagauggagaaggaau

SEQ ID NO: 1296 - RNA, 19 nt, Artificial Sequence
  Synthetic
uccuaaaggucuuggguuu

SEQ ID NO: 1297 - RNA, 19 nt, Artificial Sequence
  Synthetic
aggagaagauggagaagga

SEQ ID NO: 1298 - RNA, 19 nt, Artificial Sequence
  Synthetic
ccauagaacggguuauuaa

SEQ ID NO: 1299 - RNA, 19 nt, Artificial Sequence
  Synthetic
gguagauggaagagauuau

SEQ ID NO: 1300 - RNA, 19 nt, Artificial Sequence
  Synthetic
caagagagcagauggaaaa

SEQ ID NO: 1301 - RNA, 19 nt, Artificial Sequence
  Synthetic
ccaccauaccacaggcaaa

SEQ ID NO: 1302 - RNA, 19 nt, Artificial Sequence
  Synthetic
ccucauacaacuagaccaa

SEQ ID NO: 1303 - RNA, 19 nt, Artificial Sequence
  Synthetic
uaucagagauugagaaugu

SEQ ID NO: 1304 - RNA, 19 nt, Artificial Sequence
  Synthetic
ucaagagagcagauggaaa

SEQ ID NO: 1305 - RNA, 19 nt, Artificial Sequence
  Synthetic
guauaugaaugauggcuau

SEQ ID NO: 1306 - RNA, 19 nt, Artificial Sequence
  Synthetic
uggaaaugccauaaagaga

SEQ ID NO: 1307 - RNA, 19 nt, Artificial Sequence
  Synthetic
ugaugaaauuacaagggaa

SEQ ID NO: 1308 - RNA, 19 nt, Artificial Sequence
  Synthetic
cgaugaggucggagugauu

SEQ ID NO: 1309 - RNA, 19 nt, Artificial Sequence
  Synthetic
cggaggaccugcugaucua

SEQ ID NO: 1310 - RNA, 19 nt, Artificial Sequence
  Synthetic
uaguauuaguucaggguca

SEQ ID NO: 1311 - RNA, 19 nt, Artificial Sequence
  Synthetic
gcaaugagagagagaauua

SEQ ID NO: 1312 - RNA, 19 nt, Artificial Sequence
  Synthetic
ggaagaaugugcugaaaca

SEQ ID NO: 1313 - RNA, 19 nt, Artificial Sequence
  Synthetic
guacagaucuggauggauu

SEQ ID NO: 1314 - RNA, 19 nt, Artificial Sequence
  Synthetic
cuggauggauuuugggaua

SEQ ID NO: 1315 - RNA, 19 nt, Artificial Sequence
  Synthetic
ggaugaugcuggaagaauu

SEQ ID NO: 1316 - RNA, 19 nt, Artificial Sequence
  Synthetic
gaaagagcagagagagaaa

SEQ ID NO: 1317 - RNA, 19 nt, Artificial Sequence
  Synthetic
ggauauaaguacugaaaug

SEQ ID NO: 1318 - RNA, 19 nt, Artificial Sequence
  Synthetic
gaagaauugcagcgagaaa

SEQ ID NO: 1319 - RNA, 19 nt, Artificial Sequence
  Synthetic
gguugaugauugugaauau

SEQ ID NO: 1320 - RNA, 19 nt, Artificial Sequence
  Synthetic
cugaagaccuaucaaguaa

SEQ ID NO: 1321 - RNA, 19 nt, Artificial Sequence
  Synthetic
gagcagagagagaaagcua

SEQ ID NO: 1322 - RNA, 19 nt, Artificial Sequence
  Synthetic
uggaagaauugcagcgaga

SEQ ID NO: 1323 - RNA, 19 nt, Artificial Sequence
  Synthetic
aaggaaaggugccaaguaa

SEQ ID NO: 1324 - RNA, 19 nt, Artificial Sequence
  Synthetic
cugugaaagcugagccaaa

SEQ ID NO: 1325 - RNA, 19 nt, Artificial Sequence
  Synthetic
gagcagacuaagauugaua

SEQ ID NO: 1326 - RNA, 19 nt, Artificial Sequence
  Synthetic
gcagagagagaaagcuaaa

SEQ ID NO: 1327 - RNA, 19 nt, Artificial Sequence
  Synthetic
aguugaaaguccuguuaaa

SEQ ID NO: 1328 - RNA, 19 nt, Artificial Sequence
  Synthetic
uugaaagagcagagagaga

SEQ ID NO: 1329 - RNA, 19 nt, Artificial Sequence
  Synthetic
gaggagacaucaagaacau

SEQ ID NO: 1330 - RNA, 19 nt, Artificial Sequence
  Synthetic
ugaaagaaaugaaggucga

SEQ ID NO: 1331 - RNA, 19 nt, Artificial Sequence
  Synthetic
gaaagcuaaacgaggaaua

SEQ ID NO: 1332 - RNA, 19 nt, Artificial Sequence
  Synthetic
agguagaauucuuguugaa

SEQ ID NO: 1333 - RNA, 19 nt, Artificial Sequence
  Synthetic
aaaccagaaugcugugaaa

SEQ ID NO: 1334 - RNA, 19 nt, Artificial Sequence
  Synthetic
caaacuacaucaccagaaa

SEQ ID NO: 1335 - RNA, 19 nt, Artificial Sequence
  Synthetic
cgaacgaaauagacacuuu

SEQ ID NO: 1336 - RNA, 19 nt, Artificial Sequence
  Synthetic
agacuaagauugauaacga

SEQ ID NO: 1337 - RNA, 19 nt, Artificial Sequence
  Synthetic
augcaaugagagagagaau

SEQ ID NO: 1338 - RNA, 19 nt, Artificial Sequence
  Synthetic
ggucuaaacugcaguaauc

SEQ ID NO: 1339 - RNA, 19 nt, Artificial Sequence
  Synthetic
cagaaaagaccaauguuaa

SEQ ID NO: 1340 - RNA, 19 nt, Artificial Sequence
  Synthetic
gagaaagcuaaacgaggaa

SEQ ID NO: 1341 - RNA, 19 nt, Artificial Sequence
  Synthetic
ggaaauggauccugagaaa

SEQ ID NO: 1342 - RNA, 19 nt, Artificial Sequence
  Synthetic
agauaaagcuacugggcaa

SEQ ID NO: 1343 - RNA, 19 nt, Artificial Sequence
  Synthetic
gaauaggaguuaagggaau

SEQ ID NO: 1344 - RNA, 19 nt, Artificial Sequence
  Synthetic
gggaaaggaucaaguaauu

SEQ ID NO: 1345 - RNA, 19 nt, Artificial Sequence
  Synthetic
ggaaacaggugguaaagua

SEQ ID NO: 1346 - RNA, 19 nt, Artificial Sequence
  Synthetic
ggaauggauugaaggcaaa

SEQ ID NO: 1347 - RNA, 19 nt, Artificial Sequence
  Synthetic
gaauaggauuaaugagcaa

SEQ ID NO: 1348 - RNA, 19 nt, Artificial Sequence
  Synthetic
guacuaaaccguuaaguua

SEQ ID NO: 1349 - RNA, 19 nt, Artificial Sequence
  Synthetic
gcacagauuuugaacgaau

SEQ ID NO: 1350 - RNA, 19 nt, Artificial Sequence
  Synthetic
aggaaauggccaaggaaau

SEQ ID NO: 1351 - RNA, 19 nt, Artificial Sequence
  Synthetic
ggaaacaaaugcuguaauu

SEQ ID NO: 1352 - RNA, 19 nt, Artificial Sequence
  Synthetic
ugaagaagguguacaggaa

SEQ ID NO: 1353 - RNA, 19 nt, Artificial Sequence
  Synthetic
uggaauggauugaaggcaa

SEQ ID NO: 1354 - RNA, 19 nt, Artificial Sequence
  Synthetic
ccagaacgaacgugggaaa

SEQ ID NO: 1355 - RNA, 19 nt, Artificial Sequence
  Synthetic
gauugaaggcaaagaaaga

SEQ ID NO: 1356 - RNA, 19 nt, Artificial Sequence
  Synthetic
gaaugaaaaugguggcuaa

SEQ ID NO: 1357 - RNA, 19 nt, Artificial Sequence
  Synthetic
ccaccaacuuucugacuaa

SEQ ID NO: 1358 - RNA, 19 nt, Artificial Sequence
  Synthetic
gaaacaaagucucagauau

SEQ ID NO: 1359 - RNA, 19 nt, Artificial Sequence
  Synthetic
gaggaaauggccaaggaaa

SEQ ID NO: 1360 - RNA, 19 nt, Artificial Sequence
  Synthetic
gaaagaauaucguguccaa

SEQ ID NO: 1361 - RNA, 19 nt, Artificial Sequence
  Synthetic
ggacaggcuccaauagaua

SEQ ID NO: 1362 - RNA, 19 nt, Artificial Sequence
  Synthetic
cuacacaaagggagauuua

SEQ ID NO: 1363 - RNA, 19 nt, Artificial Sequence
  Synthetic
cauaaacuguucaagguaa

SEQ ID NO: 1364 - RNA, 19 nt, Artificial Sequence
  Synthetic
gaaucaggaaagugagcaa

SEQ ID NO: 1365 - RNA, 19 nt, Artificial Sequence
  Synthetic
gagcaguugugguaagaga

SEQ ID NO: 1366 - RNA, 19 nt, Artificial Sequence
  Synthetic
caaguaauuuggaagggaa

SEQ ID NO: 1367 - RNA, 19 nt, Artificial Sequence
  Synthetic
gaaaggaggaaauggccaa

SEQ ID NO: 1368 - RNA, 19 nt, Artificial Sequence
  Synthetic
ugacaggauuucuggauuu

SEQ ID NO: 1369 - RNA, 19 nt, Artificial Sequence
  Synthetic
guagauauugugugaacua

SEQ ID NO: 1370 - RNA, 19 nt, Artificial Sequence
  Synthetic
caacuuaucaggaccaaua

SEQ ID NO: 1371 - RNA, 19 nt, Artificial Sequence
  Synthetic
ggacgaggccuuugaguuu

SEQ ID NO: 1372 - RNA, 19 nt, Artificial Sequence
  Synthetic
caguuauggugaugacuua

SEQ ID NO: 1373 - RNA, 19 nt, Artificial Sequence
  Synthetic
cgucaagacauuugcugaa

SEQ ID NO: 1374 - RNA, 19 nt, Artificial Sequence
  Synthetic
cgaacagugcgcugagcua

SEQ ID NO: 1375 - RNA, 19 nt, Artificial Sequence
  Synthetic
aagcagaggcgaagcauca

SEQ ID NO: 1376 - RNA, 19 nt, Artificial Sequence
  Synthetic
caucaagaaugcuggagga

SEQ ID NO: 1377 - RNA, 19 nt, Artificial Sequence
  Synthetic
gcauaacugccuugaucaa

SEQ ID NO: 1378 - RNA, 19 nt, Artificial Sequence
  Synthetic
ugagaggagaaaugcaaua

SEQ ID NO: 1379 - RNA, 19 nt, Artificial Sequence
  Synthetic
ccuuugaguuugugaagca

SEQ ID NO: 1380 - RNA, 19 nt, Artificial Sequence
  Synthetic
gaaaggacucaguguguga

SEQ ID NO: 1381 - RNA, 19 nt, Artificial Sequence
  Synthetic
guaccugggcagugcguau

SEQ ID NO: 1382 - RNA, 19 nt, Artificial Sequence
  Synthetic
gagaaaggacucagugugu

SEQ ID NO: 1383 - RNA, 19 nt, Artificial Sequence
  Synthetic
caagaaugcuggaggaagg

SEQ ID NO: 1384 - RNA, 19 nt, Artificial Sequence
  Synthetic
cgagagggcugguccuuau

SEQ ID NO: 1385 - RNA, 19 nt, Artificial Sequence
  Synthetic
aggacaaccacaaggcaga

SEQ ID NO: 1386 - RNA, 19 nt, Artificial Sequence
  Synthetic
ccaugggccuggagcacau

SEQ ID NO: 1387 - RNA, 19 nt, Artificial Sequence
  Synthetic
ccgacgacacauauacaua

SEQ ID NO: 1388 - RNA, 19 nt, Artificial Sequence
  Synthetic
gaucaacgucucagccaau

SEQ ID NO: 1389 - RNA, 19 nt, Artificial Sequence
  Synthetic
aaauaccaguguuggguuu

SEQ ID NO: 1390 - RNA, 19 nt, Artificial Sequence
  Synthetic
guuguauguuugcugauua

SEQ ID NO: 1391 - RNA, 19 nt, Artificial Sequence
  Synthetic
aggaggauacgaagcguuu

SEQ ID NO: 1392 - RNA, 19 nt, Artificial Sequence
  Synthetic
gagaggagaaaugcaauaa

SEQ ID NO: 1393 - RNA, 19 nt, Artificial Sequence
  Synthetic
gcaucccuguggaggacaa

SEQ ID NO: 1394 - RNA, 19 nt, Artificial Sequence
  Synthetic
caucaaguccaucugacaa

SEQ ID NO: 1395 - RNA, 19 nt, Artificial Sequence
  Synthetic
gaggagaaaugcaauaacu

SEQ ID NO: 1396 - RNA, 19 nt, Artificial Sequence
  Synthetic
ucauagacuccaucaagaa

SEQ ID NO: 1397 - RNA, 19 nt, Artificial Sequence
  Synthetic
ggucacuaccaguacaaga

SEQ ID NO: 1398 - RNA, 19 nt, Artificial Sequence
  Synthetic
gacuuagcgucaagacauu

SEQ ID NO: 1399 - RNA, 19 nt, Artificial Sequence
  Synthetic
gaggaaggguguuugucca

SEQ ID NO: 1400 - RNA, 19 nt, Artificial Sequence
  Synthetic
ggagaaaugcaauaacucu

SEQ ID NO: 1401 - RNA, 19 nt, Artificial Sequence
  Synthetic
ccauaaaccuuguuacaua

SEQ ID NO: 1402 - RNA, 19 nt, Artificial Sequence
  Synthetic
gcugaaugauagacaaaua

SEQ ID NO: 1403 - RNA, 19 nt, Artificial Sequence
  Synthetic
gccagaugguggaggaaua

SEQ ID NO: 1404 - RNA, 19 nt, Artificial Sequence
  Synthetic
gcaaagaagaugaccaaau

SEQ ID NO: 1405 - RNA, 19 nt, Artificial Sequence
  Synthetic
ggucaacaauaaugagaau

SEQ ID NO: 1406 - RNA, 19 nt, Artificial Sequence
  Synthetic
gcuuggagauagaaaggaa

SEQ ID NO: 1407 - RNA, 19 nt, Artificial Sequence
  Synthetic
gagcagguguucaugauaa

SEQ ID NO: 1408 - RNA, 19 nt, Artificial Sequence
  Synthetic
ccacaaacugacaaauuaa

SEQ ID NO: 1409 - RNA, 19 nt, Artificial Sequence
  Synthetic
ucaaugaagccgagugaau

SEQ ID NO: 1410 - RNA, 19 nt, Artificial Sequence
  Synthetic
gcaaagaaccucugguguu

SEQ ID NO: 1411 - RNA, 19 nt, Artificial Sequence
  Synthetic
guaaguuugugaauggaaa

SEQ ID NO: 1412 - RNA, 19 nt, Artificial Sequence
  Synthetic
ugcuagaguucgaggaaga

SEQ ID NO: 1413 - RNA, 19 nt, Artificial Sequence
  Synthetic
acaauggucuggauggaaa

SEQ ID NO: 1414 - RNA, 19 nt, Artificial Sequence
  Synthetic
agaaaggccuguucaacua

SEQ ID NO: 1415 - RNA, 19 nt, Artificial Sequence
  Synthetic
gaggauggauucugguuuu

SEQ ID NO: 1416 - RNA, 19 nt, Artificial Sequence
  Synthetic
gaagagagaaggcaaagaa

SEQ ID NO: 1417 - RNA, 19 nt, Artificial Sequence
  Synthetic
gaggauagccaaugaucau

SEQ ID NO: 1418 - RNA, 19 nt, Artificial Sequence
  Synthetic
ccaaaugcagcaagaguca

SEQ ID NO: 1419 - RNA, 19 nt, Artificial Sequence
  Synthetic
cgaagauacuacacacuuu

SEQ ID NO: 1420 - RNA, 19 nt, Artificial Sequence
  Synthetic
gcucacuggugcaaagaga

SEQ ID NO: 1421 - RNA, 19 nt, Artificial Sequence
  Synthetic
ccuaaacaacggugugaca

SEQ ID NO: 1422 - RNA, 19 nt, Artificial Sequence
  Synthetic
uaagaauccuucaggcauu

SEQ ID NO: 1423 - RNA, 19 nt, Artificial Sequence
  Synthetic
cccacaaacugacaaauua

SEQ ID NO: 1424 - RNA, 19 nt, Artificial Sequence
  Synthetic
gaucaaugaagccgaguga

SEQ ID NO: 1425 - RNA, 19 nt, Artificial Sequence
  Synthetic
ugaggaaggaggauggauu

SEQ ID NO: 1426 - RNA, 19 nt, Artificial Sequence
  Synthetic
ggaagaugcucugguggua

SEQ ID NO: 1427 - RNA, 19 nt, Artificial Sequence
  Synthetic
ccaaggagcuguccacauu

SEQ ID NO: 1428 - RNA, 19 nt, Artificial Sequence
  Synthetic
guucauagaccgaagauac

SEQ ID NO: 1429 - RNA, 19 nt, Artificial Sequence
  Synthetic
ugacaaauuaaggagguua

SEQ ID NO: 1430 - RNA, 19 nt, Artificial Sequence
  Synthetic
gaaacaacacggaucaaga

SEQ ID NO: 1431 - RNA, 19 nt, Artificial Sequence
  Synthetic
gggaauggacccagugaua

SEQ ID NO: 1432 - RNA, 19 nt, Artificial Sequence
  Synthetic
aaacaaggaccuagguaua

SEQ ID NO: 1433 - RNA, 19 nt, Artificial Sequence
  Synthetic
gaaacuugcuccagaagaa

SEQ ID NO: 1434 - RNA, 19 nt, Artificial Sequence
  Synthetic
uaacaaaauccgagaacaa

SEQ ID NO: 1435 - RNA, 19 nt, Artificial Sequence
  Synthetic
ccagaggauuugccagaaa

SEQ ID NO: 1436 - RNA, 19 nt, Artificial Sequence
  Synthetic
ccacaauaagccuguuaaa

SEQ ID NO: 1437 - RNA, 19 nt, Artificial Sequence
  Synthetic
guauucaagcuuaaggaaa

SEQ ID NO: 1438 - RNA, 19 nt, Artificial Sequence
  Synthetic
gcugauaaauuugcaguaa

SEQ ID NO: 1439 - RNA, 19 nt, Artificial Sequence
  Synthetic
gggacauugcuuagaaaga

SEQ ID NO: 1440 - RNA, 19 nt, Artificial Sequence
  Synthetic
gaacugaagcauugagaac

SEQ ID NO: 1441 - RNA, 19 nt, Artificial Sequence
  Synthetic
ccaagaagaagggcggaaa

SEQ ID NO: 1442 - RNA, 19 nt, Artificial Sequence
  Synthetic
ccacuguacccaugguuua

SEQ ID NO: 1443 - RNA, 19 nt, Artificial Sequence
  Synthetic
ggugguauccuuauaauua

SEQ ID NO: 1444 - RNA, 19 nt, Artificial Sequence
  Synthetic
ugaagaacuuggacugauu

SEQ ID NO: 1445 - RNA, 19 nt, Artificial Sequence
  Synthetic
ccgaaagguggaaagacua

SEQ ID NO: 1446 - RNA, 19 nt, Artificial Sequence
  Synthetic
guacccaggucaagugauu

SEQ ID NO: 1447 - RNA, 19 nt, Artificial Sequence
  Synthetic
guguguuuauguacagaaa

SEQ ID NO: 1448 - RNA, 19 nt, Artificial Sequence
  Synthetic
gaauggacccagugauaca

SEQ ID NO: 1449 - RNA, 19 nt, Artificial Sequence
  Synthetic
acugaagcauugagaacuu

SEQ ID NO: 1450 - RNA, 19 nt, Artificial Sequence
  Synthetic
cgaaagguggaaagacuau

SEQ ID NO: 1451 - RNA, 19 nt, Artificial Sequence
  Synthetic
gaaaauuacuggugugacu

SEQ ID NO: 1452 - RNA, 19 nt, Artificial Sequence
  Synthetic
ggagaggacuauucacaca

SEQ ID NO: 1453 - RNA, 19 nt, Artificial Sequence
  Synthetic
cagagaauccacauguuua

SEQ ID NO: 1454 - RNA, 19 nt, Artificial Sequence
  Synthetic
ccuuauguauucaagcuua

SEQ ID NO: 1455 - RNA, 19 nt, Artificial Sequence
  Synthetic
cccgaaagguggaaagacu

SEQ ID NO: 1456 - RNA, 19 nt, Artificial Sequence
  Synthetic
ggauagaagaaggugguau

SEQ ID NO: 1457 - RNA, 19 nt, Artificial Sequence
  Synthetic
gguccuaucagaaagaauu

SEQ ID NO: 1458 - RNA, 19 nt, Artificial Sequence
  Synthetic
cagaaugguccuaucagaa

SEQ ID NO: 1459 - RNA, 19 nt, Artificial Sequence
  Synthetic
gaacuucccuugcaaauua

SEQ ID NO: 1460 - RNA, 19 nt, Artificial Sequence
  Synthetic
ccucuuugcugauaaauuu

SEQ ID NO: 1461 - RNA, 19 nt, Artificial Sequence
  Synthetic
ugaaaugggagaagauaaa

SEQ ID NO: 1462 - RNA, 19 nt, Artificial Sequence
  Synthetic
gaacagugcucuuguggua

SEQ ID NO: 1463 - RNA, 19 nt, Artificial Sequence
  Synthetic
ggaagaaacuugcagauga

SEQ ID NO: 1464 - RNA, 19 nt, Artificial Sequence
  Synthetic
guggauaccucuagugcaa

SEQ ID NO: 1465 - RNA, 19 nt, Artificial Sequence
  Synthetic
agaauagaguggaugaaau

SEQ ID NO: 1466 - RNA, 19 nt, Artificial Sequence
  Synthetic
gaagaaacuugcagaugau

SEQ ID NO: 1467 - RNA, 19 nt, Artificial Sequence
  Synthetic
ugaaggaaguggaccuaua

SEQ ID NO: 1468 - RNA, 19 nt, Artificial Sequence
  Synthetic
acauaagaauagaguggau

SEQ ID NO: 1469 - RNA, 19 nt, Artificial Sequence
  Synthetic
acagagaaguauccagaau

SEQ ID NO: 1470 - RNA, 19 nt, Artificial Sequence
  Synthetic
ugaaauuauaccaggcaau

SEQ ID NO: 1471 - RNA, 19 nt, Artificial Sequence
  Synthetic
gauguaaccuggaaacuau

SEQ ID NO: 1472 - RNA, 19 nt, Artificial Sequence
  Synthetic
gaugauaugugcugccuuu

SEQ ID NO: 1473 - RNA, 19 nt, Artificial Sequence
  Synthetic
ucacaaggauugaaagaug

SEQ ID NO: 1474 - RNA, 19 nt, Artificial Sequence
  Synthetic
uguagaaagugcaggcgau

SEQ ID NO: 1475 - RNA, 19 nt, Artificial Sequence
  Synthetic
aaccagaggcuaagaugaa

SEQ ID NO: 1476 - RNA, 19 nt, Artificial Sequence
  Synthetic
uagaguggaugaaaugaaa

SEQ ID NO: 1477 - RNA, 19 nt, Artificial Sequence
  Synthetic
uauaccaggcaaugggaua

SEQ ID NO: 1478 - RNA, 19 nt, Artificial Sequence
  Synthetic
ucuugugguagguggauaa

SEQ ID NO: 1479 - RNA, 19 nt, Artificial Sequence
  Synthetic
gauugaaagaugagguucu

SEQ ID NO: 1480 - RNA, 19 nt, Artificial Sequence
  Synthetic
ggauaccucuagugcaauu

SEQ ID NO: 1481 - RNA, 19 nt, Artificial Sequence
  Synthetic
gaggcaagcucaauguaca

SEQ ID NO: 1482 - RNA, 19 nt, Artificial Sequence
  Synthetic
gaauagaguggaugaaaug

SEQ ID NO: 1483 - RNA, 19 nt, Artificial Sequence
  Synthetic
ccuguacaguggauggaau

SEQ ID NO: 1484 - RNA, 19 nt, Artificial Sequence
  Synthetic
cgaaguguggccauaauaa

SEQ ID NO: 1485 - RNA, 19 nt, Artificial Sequence
  Synthetic
aagaugagguucucuacaa

SEQ ID NO: 1486 - RNA, 19 nt, Artificial Sequence
  Synthetic
agugauggauggacagcuu

SEQ ID NO: 1487 - RNA, 19 nt, Artificial Sequence
  Synthetic
uggacaaacccgagacgga

SEQ ID NO: 1488 - RNA, 19 nt, Artificial Sequence
  Synthetic
agaaagugcaggcgaucau

SEQ ID NO: 1489 - RNA, 19 nt, Artificial Sequence
  Synthetic
cugaaauuauaccaggcaa

SEQ ID NO: 1490 - RNA, 19 nt, Artificial Sequence
  Synthetic
ugggagugauggauggaca

SEQ ID NO: 1491 - RNA, 19 nt, Artificial Sequence
  Synthetic
ccugagauguaaacagcaa

SEQ ID NO: 1492 - RNA, 19 nt, Artificial Sequence
  Synthetic
ccucuuagcggguggauuu

SEQ ID NO: 1493 - RNA, 19 nt, Artificial Sequence
  Synthetic
aaauauucaucgucgcaaa

SEQ ID NO: 1494 - RNA, 19 nt, Artificial Sequence
  Synthetic
cagagauucuuuaugcaaa

SEQ ID NO: 1495 - RNA, 19 nt, Artificial Sequence
  Synthetic
guggaaugucccuggagua

SEQ ID NO: 1496 - RNA, 19 nt, Artificial Sequence
  Synthetic
gaaugucccuggaguacua

SEQ ID NO: 1497 - RNA, 19 nt, Artificial Sequence
  Synthetic
caguccaucucuauaauaa

SEQ ID NO: 1498 - RNA, 19 nt, Artificial Sequence
  Synthetic
cuagugacccugagaugua

SEQ ID NO: 1499 - RNA, 19 nt, Artificial Sequence
  Synthetic
ggauggacucacugcagaa

SEQ ID NO: 1500 - RNA, 19 nt, Artificial Sequence
  Synthetic
gugcaggcccaccgcaaua

SEQ ID NO: 1501 - RNA, 19 nt, Artificial Sequence
  Synthetic
gguggacacaggugccaaa

SEQ ID NO: 1502 - RNA, 19 nt, Artificial Sequence
  Synthetic
caucaagugugcggagaca

SEQ ID NO: 1503 - RNA, 19 nt, Artificial Sequence
  Synthetic
agaacaugacgcugguaga

SEQ ID NO: 1504 - RNA, 19 nt, Artificial Sequence
  Synthetic
ccagauacucccacaggau

SEQ ID NO: 1505 - RNA, 19 nt, Artificial Sequence
  Synthetic
gggacaagagcaagcugau

SEQ ID NO: 1506 - RNA, 19 nt, Artificial Sequence
  Synthetic
ugaggcagaggcagggaua

SEQ ID NO: 1507 - RNA, 19 nt, Artificial Sequence
  Synthetic
gccaaauucuaccguggaa

SEQ ID NO: 1508 - RNA, 19 nt, Artificial Sequence
  Synthetic
uggccuuccucaugaucua

SEQ ID NO: 1509 - RNA, 19 nt, Artificial Sequence
  Synthetic
ggacacaggugccaaauuc

SEQ ID NO: 1510 - RNA, 19 nt, Artificial Sequence
  Synthetic
guucaguccaucucuauaa

SEQ ID NO: 1511 - RNA, 19 nt, Artificial Sequence
  Synthetic
ucagagauucuuuaugcaa

SEQ ID NO: 1512 - RNA, 19 nt, Artificial Sequence
  Synthetic
cgaacugcccgucagagaa

SEQ ID NO: 1513 - RNA, 19 nt, Artificial Sequence
  Synthetic
acacaggugccaaauucua

SEQ ID NO: 1514 - RNA, 19 nt, Artificial Sequence
  Synthetic
ccaauucagagauucuuua

SEQ ID NO: 1515 - RNA, 19 nt, Artificial Sequence
  Synthetic
cugccacacugaaccauau

SEQ ID NO: 1516 - RNA, 19 nt, Artificial Sequence
  Synthetic
ggagacaggcggcugaaag

SEQ ID NO: 1517 - RNA, 19 nt, Artificial Sequence
  Synthetic
uggacucacugcagaagca

SEQ ID NO: 1518 - RNA, 19 nt, Artificial Sequence
  Synthetic
gcacgaacugcccgucaga

SEQ ID NO: 1519 - RNA, 19 nt, Artificial Sequence
  Synthetic
ggauuucccugacccaauu

SEQ ID NO: 1520 - RNA, 19 nt, Artificial Sequence
  Synthetic
gcugccacacugaaccaua

SEQ ID NO: 1521 - RNA, 19 nt, Artificial Sequence
  Synthetic
ggaauaguguuuauggaaa

SEQ ID NO: 1522 - RNA, 19 nt, Artificial Sequence
  Synthetic
acacuggacucuugaggaa

SEQ ID NO: 1523 - RNA, 19 nt, Artificial Sequence
  Synthetic
cauuaacccuuuagagaca

SEQ ID NO: 1524 - RNA, 19 nt, Artificial Sequence
  Synthetic
ggacauaaagggaaugcau

SEQ ID NO: 1525 - RNA, 19 nt, Artificial Sequence
  Synthetic
ggaugauuuccgagggaga

SEQ ID NO: 1526 - RNA, 19 nt, Artificial Sequence
  Synthetic
ucgcguaccugaugaaauu

SEQ ID NO: 1527 - RNA, 19 nt, Artificial Sequence
  Synthetic
aggaagaaggagacucuaa

SEQ ID NO: 1528 - RNA, 19 nt, Artificial Sequence
  Synthetic
uuugggaagucgacaguua

SEQ ID NO: 1529 - RNA, 19 nt, Artificial Sequence
  Synthetic
aaugaaaucugcugcaaaa

SEQ ID NO: 1530 - RNA, 19 nt, Artificial Sequence
  Synthetic
auacauugcuagucacauu

SEQ ID NO: 1531 - RNA, 19 nt, Artificial Sequence
  Synthetic
cauaggaggcauugcucaa

SEQ ID NO: 1532 - RNA, 19 nt, Artificial Sequence
  Synthetic
ggaggcaacugauagacua

SEQ ID NO: 1533 - RNA, 19 nt, Artificial Sequence
  Synthetic
gcauaguucccgacgucua

SEQ ID NO: 1534 - RNA, 19 nt, Artificial Sequence
  Synthetic
gggagacauaggaggcauu

SEQ ID NO: 1535 - RNA, 19 nt, Artificial Sequence
  Synthetic
uggaauaguguuuauggaa

SEQ ID NO: 1536 - RNA, 19 nt, Artificial Sequence
  Synthetic
gacauaaagggaaugcaua

SEQ ID NO: 1537 - RNA, 19 nt, Artificial Sequence
  Synthetic
ccauugagaucccuaauuu

SEQ ID NO: 1538 - RNA, 19 nt, Artificial Sequence
  Synthetic
cggaccagacagaugcuua

SEQ ID NO: 1539 - RNA, 19 nt, Artificial Sequence
  Synthetic
ggaagaaggagacucuaau

SEQ ID NO: 1540 - RNA, 19 nt, Artificial Sequence
  Synthetic
ggucacagcacgcuaccaa

SEQ ID NO: 1541 - RNA, 19 nt, Artificial Sequence
  Synthetic
uaaugaaaucugcugcaaa

SEQ ID NO: 1542 - RNA, 19 nt, Artificial Sequence
  Synthetic
ugauagacuacgagcgcca

SEQ ID NO: 1543 - RNA, 19 nt, Artificial Sequence
  Synthetic
augcauacauugcuaguca

SEQ ID NO: 1544 - RNA, 19 nt, Artificial Sequence
  Synthetic
cugacaagauccacagugu

SEQ ID NO: 1545 - RNA, 19 nt, Artificial Sequence
  Synthetic
agaaggagacucuaauuuu

SEQ ID NO: 1546 - RNA, 19 nt, Artificial Sequence
  Synthetic
gaggcauacaacuggguga

SEQ ID NO: 1547 - RNA, 19 nt, Artificial Sequence
  Synthetic
uuagugacucuguaaguaa

SEQ ID NO: 1548 - RNA, 19 nt, Artificial Sequence
  Synthetic
gguucucccucaaguguuu

SEQ ID NO: 1549 - RNA, 19 nt, Artificial Sequence
  Synthetic
aggaggagcucagugcaaa

SEQ ID NO: 1550 - RNA, 19 nt, Artificial Sequence
  Synthetic
aagaaggagacucuaauuu

SEQ ID NO: 1551 - RNA, 19 nt, Artificial Sequence
  Synthetic
gagggagaguggaggguuu

SEQ ID NO: 1552 - RNA, 19 nt, Artificial Sequence
  Synthetic
uuaaagagacacagaagaa

SEQ ID NO: 1553 - RNA, 19 nt, Artificial Sequence
  Synthetic
cgaaauaagaucacacaca

SEQ ID NO: 1554 - RNA, 19 nt, Artificial Sequence
  Synthetic
ggaggguauuaaagagaca

SEQ ID NO: 1555 - RNA, 19 nt, Artificial Sequence
  Synthetic
ugacgggccuggaggguau

SEQ ID NO: 1556 - RNA, 19 nt, Artificial Sequence
  Synthetic
gcagcagcuugaagaguuu

SEQ ID NO: 1557 - RNA, 19 nt, Artificial Sequence
  Synthetic
gaaauaagaucacacacau

SEQ ID NO: 1558 - RNA, 19 nt, Artificial Sequence
  Synthetic
gaaacuucauugaugccaa

SEQ ID NO: 1559 - RNA, 19 nt, Artificial Sequence
  Synthetic
gguauuaaagagacacaga

SEQ ID NO: 1560 - RNA, 19 nt, Artificial Sequence
  Synthetic
aaacuucauugaugccaaa

SEQ ID NO: 1561 - RNA, 19 nt, Artificial Sequence
  Synthetic
augccaaagaccuggauca

SEQ ID NO: 1562 - RNA, 19 nt, Artificial Sequence
  Synthetic
ccaaagaccuggaucagcu

SEQ ID NO: 1563 - RNA, 19 nt, Artificial Sequence
  Synthetic
gggccuggaggguauuaaa

SEQ ID NO: 1564 - RNA, 19 nt, Artificial Sequence
  Synthetic
gcguaugugaugacuguga

SEQ ID NO: 1565 - RNA, 19 nt, Artificial Sequence
  Synthetic
gaucagcugggccgaaaua

SEQ ID NO: 1566 - RNA, 19 nt, Artificial Sequence
  Synthetic
guauuaaagagacacagaa

SEQ ID NO: 1567 - RNA, 19 nt, Artificial Sequence
  Synthetic
gcuuuaggcagcagcuuga

SEQ ID NO: 1568 - RNA, 19 nt, Artificial Sequence
  Synthetic
cagcguaugugaugacugu

SEQ ID NO: 1569 - RNA, 19 nt, Artificial Sequence
  Synthetic
ggcagcagcuugaagaguu

SEQ ID NO: 1570 - RNA, 19 nt, Artificial Sequence
  Synthetic
uggaucagcugggccgaaa

SEQ ID NO: 1571 - RNA, 19 nt, Artificial Sequence
  Synthetic
cagcugggccgaaauaaga

SEQ ID NO: 1572 - RNA, 19 nt, Artificial Sequence
  Synthetic
caaagaauguaucaacuuc

SEQ ID NO: 1573 - RNA, 19 nt, Artificial Sequence
  Synthetic
aauaagaucacacacauca

SEQ ID NO: 1574 - RNA, 19 nt, Artificial Sequence
  Synthetic
gccuggaggguauuaaaga

SEQ ID NO: 1575 - RNA, 19 nt, Artificial Sequence
  Synthetic
ucacacacaucaucucuau

SEQ ID NO: 1576 - RNA, 19 nt, Artificial Sequence
  Synthetic
gccgaaauaagaucacaca

SEQ ID NO: 1577 - RNA, 19 nt, Artificial Sequence
  Synthetic
gggccgaaauaagaucaca

SEQ ID NO: 1578 - RNA, 19 nt, Artificial Sequence
  Synthetic
gguacuuccuggacucuac

SEQ ID NO: 1579 - RNA, 19 nt, Artificial Sequence
  Synthetic
auccacugcugccgccuua

SEQ ID NO: 1580 - RNA, 19 nt, Artificial Sequence
  Synthetic
gacucuaccucggaaacuu

SEQ ID NO: 1581 - RNA, 19 nt, Artificial Sequence
  Synthetic
cagaagaugcuuuggaaua

SEQ ID NO: 1582 - RNA, 19 nt, Artificial Sequence
  Synthetic
ggacaugucuuuagaugaa

SEQ ID NO: 1583 - RNA, 19 nt, Artificial Sequence
  Synthetic
cggcagaagccaagugaca

SEQ ID NO: 1584 - RNA, 19 nt, Artificial Sequence
  Synthetic
caucagggccaaagagcaa

SEQ ID NO: 1585 - RNA, 19 nt, Artificial Sequence
  Synthetic
ugacagcuuuugugagaaa

SEQ ID NO: 1586 - RNA, 19 nt, Artificial Sequence
  Synthetic
agaagaagauuaagaacca

SEQ ID NO: 1587 - RNA, 19 nt, Artificial Sequence
  Synthetic
gcuggaaaguggaacggaa

SEQ ID NO: 1588 - RNA, 19 nt, Artificial Sequence
  Synthetic
gcaauaagcucaagcguuc

SEQ ID NO: 1589 - RNA, 19 nt, Artificial Sequence
  Synthetic
ucacuguacuucuggguaa

SEQ ID NO: 1590 - RNA, 19 nt, Artificial Sequence
  Synthetic
cuggaaaguggaacggaaa

SEQ ID NO: 1591 - RNA, 19 nt, Artificial Sequence
  Synthetic
gucagaagguuguaguuua

SEQ ID NO: 1592 - RNA, 19 nt, Artificial Sequence
  Synthetic
guguuaaaugccagcaaua

SEQ ID NO: 1593 - RNA, 19 nt, Artificial Sequence
  Synthetic
ugggauugguuauguguua

SEQ ID NO: 1594 - RNA, 19 nt, Artificial Sequence
  Synthetic
cauccagcauucagcgaaa

SEQ ID NO: 1595 - RNA, 19 nt, Artificial Sequence
  Synthetic
ggacaaaguguuaauuaca

SEQ ID NO: 1596 - RNA, 19 nt, Artificial Sequence
  Synthetic
gugggagcguggaggacaa

SEQ ID NO: 1597 - RNA, 19 nt, Artificial Sequence
  Synthetic
cuuacagauuugugaaaga

SEQ ID NO: 1598 - RNA, 19 nt, Artificial Sequence
  Synthetic
gguuguaguuuacgaucaa

SEQ ID NO: 1599 - RNA, 19 nt, Artificial Sequence
  Synthetic
gacuaugagaagaagauua

SEQ ID NO: 1600 - RNA, 19 nt, Artificial Sequence
  Synthetic
cucagaggguggacagaaa

SEQ ID NO: 1601 - RNA, 19 nt, Artificial Sequence
  Synthetic
gcagaaugggauugguuau

SEQ ID NO: 1602 - RNA, 19 nt, Artificial Sequence
  Synthetic
gcagaagccaagugacaga

SEQ ID NO: 1603 - RNA, 19 nt, Artificial Sequence
  Synthetic
cagcgaaacauaagguuga

SEQ ID NO: 1604 - RNA, 19 nt, Artificial Sequence
  Synthetic
cuucagacagccagagcaa

SEQ ID NO: 1605 - RNA, 19 nt, Artificial Sequence
  Synthetic
ggagcguggaggacaauua

SEQ ID NO: 1606 - RNA, 19 nt, Artificial Sequence
  Synthetic
agaugaagcuuacagauuu

SEQ ID NO: 1607 - RNA, 19 nt, Artificial Sequence
  Synthetic
gaagguugcaacaggacaa

SEQ ID NO: 1608 - RNA, 19 nt, Artificial Sequence
  Synthetic
caguagauuucauugagaa

SEQ ID NO: 1609 - RNA, 19 nt, Artificial Sequence
  Synthetic
cagcauucagcgaaacaua

SEQ ID NO: 1610 - RNA, 19 nt, Artificial Sequence
  Synthetic
ccgcagacaggcuggaaga

SEQ ID NO: 1611 - RNA, 19 nt, Artificial Sequence
  Synthetic
gugagauggugaagauaaa

SEQ ID NO: 1612 - RNA, 19 nt, Artificial Sequence
  Synthetic
agucagagguacagaucua

SEQ ID NO: 1613 - RNA, 19 nt, Artificial Sequence
  Synthetic
gcacagcacuuuauuguua

SEQ ID NO: 1614 - RNA, 19 nt, Artificial Sequence
  Synthetic
ucaacaauuucuuggcaua

SEQ ID NO: 1615 - RNA, 19 nt, Artificial Sequence
  Synthetic
gcaagaacacugugcacau

SEQ ID NO: 1616 - RNA, 19 nt, Artificial Sequence
  Synthetic
gaaugaaucugcuacaauu

SEQ ID NO: 1617 - RNA, 19 nt, Artificial Sequence
  Synthetic
ggacacagccuagcagaaa

SEQ ID NO: 1618 - RNA, 19 nt, Artificial Sequence
  Synthetic
acccagagccagagccuua

SEQ ID NO: 1619 - RNA, 19 nt, Artificial Sequence
  Synthetic
uauggaaaccaaagcguua

SEQ ID NO: 1620 - RNA, 19 nt, Artificial Sequence
  Synthetic
ugugagauggugaagauaa

SEQ ID NO: 1621 - RNA, 19 nt, Artificial Sequence
  Synthetic
acaaaguacucuuccaaaa

SEQ ID NO: 1622 - RNA, 19 nt, Artificial Sequence
  Synthetic
guacagaucuauuguugau

SEQ ID NO: 1623 - RNA, 19 nt, Artificial Sequence
  Synthetic
ucgccuaccucaugaagua

SEQ ID NO: 1624 - RNA, 19 nt, Artificial Sequence
  Synthetic
acaccuuguaugaggauau

SEQ ID NO: 1625 - RNA, 19 nt, Artificial Sequence
  Synthetic
gcacacacauccucauaau

SEQ ID NO: 1626 - RNA, 19 nt, Artificial Sequence
  Synthetic
ggaaugaaucugcuacaau

SEQ ID NO: 1627 - RNA, 19 nt, Artificial Sequence
  Synthetic
gcacauggcaggccuggaa

SEQ ID NO: 1628 - RNA, 19 nt, Artificial Sequence
  Synthetic
gaaugaucccugacaucua

SEQ ID NO: 1629 - RNA, 19 nt, Artificial Sequence
  Synthetic
gauccaaacuugaacauuc

SEQ ID NO: 1630 - RNA, 19 nt, Artificial Sequence
  Synthetic
cagauggugcccagaagaa

SEQ ID NO: 1631 - RNA, 19 nt, Artificial Sequence
  Synthetic
caguggagguagugaacac

SEQ ID NO: 1632 - RNA, 19 nt, Artificial Sequence
  Synthetic
acagaguuauugugaagau

SEQ ID NO: 1633 - RNA, 19 nt, Artificial Sequence
  Synthetic
gagauggugaagauaaauu

SEQ ID NO: 1634 - RNA, 19 nt, Artificial Sequence
  Synthetic
caugaaugauagacucuuu

SEQ ID NO: 1635 - RNA, 19 nt, Artificial Sequence
  Synthetic
gcuguagcuuuuaacuuua

SEQ ID NO: 1636 - RNA, 19 nt, Artificial Sequence
  Synthetic
ggagagaguuuuccaugga

SEQ ID NO: 1637 - RNA, 19 nt, Artificial Sequence
  Synthetic
gcgacgagcccauugcuau

SEQ ID NO: 1638 - RNA, 19 nt, Artificial Sequence
  Synthetic
augagaaggaaguccguuu

SEQ ID NO: 1639 - RNA, 19 nt, Artificial Sequence
  Synthetic
ggcaaaagaugguguuagu

SEQ ID NO: 1640 - RNA, 19 nt, Artificial Sequence
  Synthetic
aaacagaugaugccuuuua

SEQ ID NO: 1641 - RNA, 19 nt, Artificial Sequence
  Synthetic
guacauaucaagagggcaa

SEQ ID NO: 1642 - RNA, 19 nt, Artificial Sequence
  Synthetic
gagcaagcauagauggaaa

SEQ ID NO: 1643 - RNA, 19 nt, Artificial Sequence
  Synthetic
caaguaaagcuuugaguua

SEQ ID NO: 1644 - RNA, 19 nt, Artificial Sequence
  Synthetic
ggagaaggguuaugguuuu

SEQ ID NO: 1645 - RNA, 19 nt, Artificial Sequence
  Synthetic
guuucuagguguugauaua

SEQ ID NO: 1646 - RNA, 19 nt, Artificial Sequence
  Synthetic
gcaauaagugugacagaau

SEQ ID NO: 1647 - RNA, 19 nt, Artificial Sequence
  Synthetic
gaguuaaccuaaugaguca

SEQ ID NO: 1648 - RNA, 19 nt, Artificial Sequence
  Synthetic
gcuaagaagcagucuaaau

SEQ ID NO: 1649 - RNA, 19 nt, Artificial Sequence
  Synthetic
ccacaaucauuuacaguuu

SEQ ID NO: 1650 - RNA, 19 nt, Artificial Sequence
  Synthetic
ggguaagauucaaacauuu

SEQ ID NO: 1651 - RNA, 19 nt, Artificial Sequence
  Synthetic
caauaagugugacagaaua

SEQ ID NO: 1652 - RNA, 19 nt, Artificial Sequence
  Synthetic
ccugaugaauucugaacaa

SEQ ID NO: 1653 - RNA, 19 nt, Artificial Sequence
  Synthetic
cagaauucauguuguggaa

SEQ ID NO: 1654 - RNA, 19 nt, Artificial Sequence
  Synthetic
caugaagccuugauagaau

SEQ ID NO: 1655 - RNA, 19 nt, Artificial Sequence
  Synthetic
gggagaaggguuaugguuu

SEQ ID NO: 1656 - RNA, 19 nt, Artificial Sequence
  Synthetic
gugacagaauacaggagaa

SEQ ID NO: 1657 - RNA, 19 nt, Artificial Sequence
  Synthetic
uaucaagagggcaaagaaa

SEQ ID NO: 1658 - RNA, 19 nt, Artificial Sequence
  Synthetic
cuaagaagcagucuaaaua

SEQ ID NO: 1659 - RNA, 19 nt, Artificial Sequence
  Synthetic
gaauucauguuguggaaga

SEQ ID NO: 1660 - RNA, 19 nt, Artificial Sequence
  Synthetic
aagaauaaggugacucaua

SEQ ID NO: 1661 - RNA, 19 nt, Artificial Sequence
  Synthetic
gcuuagacucugauaauuu

SEQ ID NO: 1662 - RNA, 19 nt, Artificial Sequence
  Synthetic
ugacaacgcuaacuggaaa

SEQ ID NO: 1663 - RNA, 19 nt, Artificial Sequence
  Synthetic
ccaaguagucauaaaugua

SEQ ID NO: 1664 - RNA, 19 nt, Artificial Sequence
  Synthetic
ggaaagugcauauugaaca

SEQ ID NO: 1665 - RNA, 19 nt, Artificial Sequence
  Synthetic
auagaacacucaagaagua

SEQ ID NO: 1666 - RNA, 19 nt, Artificial Sequence
  Synthetic
aagaaaagauggagugguu

SEQ ID NO: 1667 - RNA, 19 nt, Artificial Sequence
  Synthetic
guauagguguucugucaua

SEQ ID NO: 1668 - RNA, 19 nt, Artificial Sequence
  Synthetic
uggccuggauuguguauua

SEQ ID NO: 1669 - RNA, 19 nt, Artificial Sequence
  Synthetic
aacgcuaacuggaaagaaa

SEQ ID NO: 1670 - RNA, 19 nt, Artificial Sequence
  Synthetic
gaacaaaccucauuuacca

SEQ ID NO: 1671 - RNA, 19 nt, Artificial Sequence
  Synthetic
cgggaaagaccgaaaggaa

SEQ ID NO: 1672 - RNA, 19 nt, Artificial Sequence
  Synthetic
ggaaagaccgaaaggaaga

SEQ ID NO: 1673 - RNA, 19 nt, Artificial Sequence
  Synthetic
gaaaucagcuagacgcuau

SEQ ID NO: 1674 - RNA, 19 nt, Artificial Sequence
  Synthetic
auacagaacauucaggauu

SEQ ID NO: 1675 - RNA, 19 nt, Artificial Sequence
  Synthetic
gguuggaaacuuagcacuu

SEQ ID NO: 1676 - RNA, 19 nt, Artificial Sequence
  Synthetic
cuguggagaucuugcccua

SEQ ID NO: 1677 - RNA, 19 nt, Artificial Sequence
  Synthetic
ggaagugauggguguguca

SEQ ID NO: 1678 - RNA, 19 nt, Artificial Sequence
  Synthetic
gaggaggcuucgacggcuu

SEQ ID NO: 1679 - RNA, 19 nt, Artificial Sequence
  Synthetic
uacagaacauucaggauuu

SEQ ID NO: 1680 - RNA, 19 nt, Artificial Sequence
  Synthetic
ucauugacugggugaagaa

SEQ ID NO: 1681 - RNA, 19 nt, Artificial Sequence
  Synthetic
gaacaagcugugacaacca

SEQ ID NO: 1682 - RNA, 19 nt, Artificial Sequence
  Synthetic
ggacgaggccuuugacuuc

SEQ ID NO: 1683 - RNA, 19 nt, Artificial Sequence
  Synthetic
ccaccaucugucuggcaua

SEQ ID NO: 1684 - RNA, 19 nt, Artificial Sequence
  Synthetic
agacccaggugcuguguca

SEQ ID NO: 1685 - RNA, 19 nt, Artificial Sequence
  Synthetic
cagcugacauuuaacacuu

SEQ ID NO: 1686 - RNA, 19 nt, Artificial Sequence
  Synthetic
uuggaaacuuagcacuuua

SEQ ID NO: 1687 - RNA, 19 nt, Artificial Sequence
  Synthetic
caaggaacaagcugugaca

SEQ ID NO: 1688 - RNA, 19 nt, Artificial Sequence
  Synthetic
gugcucagcugacauuuaa

SEQ ID NO: 1689 - RNA, 19 nt, Artificial Sequence
  Synthetic
ggcagggguuggaaacuua

SEQ ID NO: 1690 - RNA, 19 nt, Artificial Sequence
  Synthetic
gcugcuaccuccucagagu

SEQ ID NO: 1691 - RNA, 19 nt, Artificial Sequence
  Synthetic
cauucaggauuugucaaua

SEQ ID NO: 1692 - RNA, 19 nt, Artificial Sequence
  Synthetic
gaacauucaggauuuguca

SEQ ID NO: 1693 - RNA, 19 nt, Artificial Sequence
  Synthetic
cugcaggccuguggcauca

SEQ ID NO: 1694 - RNA, 19 nt, Artificial Sequence
  Synthetic
gguccaccaccauguugaa

SEQ ID NO: 1695 - RNA, 19 nt, Artificial Sequence
  Synthetic
ugugcucagcugacauuua

SEQ ID NO: 1696 - RNA, 19 nt, Artificial Sequence
  Synthetic
gccauaggcuucauugacu

SEQ ID NO: 1697 - RNA, 19 nt, Artificial Sequence
  Synthetic
guuggaaacuuagcacuuu

SEQ ID NO: 1698 - RNA, 19 nt, Artificial Sequence
  Synthetic
ggaaacuuagcacuuuaua

SEQ ID NO: 1699 - RNA, 19 nt, Artificial Sequence
  Synthetic
gcucagcugacauuuaaca

SEQ ID NO: 1700 - RNA, 19 nt, Artificial Sequence
  Synthetic
gagcccaagcccuguguuc

SEQ ID NO: 1701 - RNA, 19 nt, Artificial Sequence
  Synthetic
gggaacagcucaucaauua

SEQ ID NO: 1702 - RNA, 19 nt, Artificial Sequence
  Synthetic
gggaaguggucaacguauu

SEQ ID NO: 1703 - RNA, 19 nt, Artificial Sequence
  Synthetic
uugcguaccucaugaaaua

SEQ ID NO: 1704 - RNA, 19 nt, Artificial Sequence
  Synthetic
acguauucuucgagggcau

SEQ ID NO: 1705 - RNA, 19 nt, Artificial Sequence
  Synthetic
uggaaguggucaacguauu

SEQ ID NO: 1706 - RNA, 19 nt, Artificial Sequence
  Synthetic
ccaaauaaccagaagcuug

SEQ ID NO: 1707 - RNA, 19 nt, Artificial Sequence
  Synthetic
cggauggugccuuguuaaa

SEQ ID NO: 1708 - RNA, 19 nt, Artificial Sequence
  Synthetic
gaacuugaacacugacauu

SEQ ID NO: 1709 - RNA, 19 nt, Artificial Sequence
  Synthetic
ccucgguggaaguggucaa

SEQ ID NO: 1710 - RNA, 19 nt, Artificial Sequence
  Synthetic
ucaacucgccgguagguaa

SEQ ID NO: 1711 - RNA, 19 nt, Artificial Sequence
  Synthetic
gaagcuuguuucucagcaa

SEQ ID NO: 1712 - RNA, 19 nt, Artificial Sequence
  Synthetic
guaacaucccugacaucua

SEQ ID NO: 1713 - RNA, 19 nt, Artificial Sequence
  Synthetic
agccuuaccuuaauagaau

SEQ ID NO: 1714 - RNA, 19 nt, Artificial Sequence
  Synthetic
acgaauucaagcuguuuaa

SEQ ID NO: 1715 - RNA, 19 nt, Artificial Sequence
  Synthetic
gaacuagcuugguaagugu

SEQ ID NO: 1716 - RNA, 19 nt, Artificial Sequence
  Synthetic
cggcugcuauccugaacua

SEQ ID NO: 1717 - RNA, 19 nt, Artificial Sequence
  Synthetic
caaauaaccagaagcuugu

SEQ ID NO: 1718 - RNA, 19 nt, Artificial Sequence
  Synthetic
acaccuagccugagacuug

SEQ ID NO: 1719 - RNA, 19 nt, Artificial Sequence
  Synthetic
gccgauagcugguccucuu

SEQ ID NO: 1720 - RNA, 19 nt, Artificial Sequence
  Synthetic
acauaaaggugccuguuac

SEQ ID NO: 1721 - RNA, 19 nt, Artificial Sequence
  Synthetic
ggugggaaguggucaacgu

SEQ ID NO: 1722 - RNA, 19 nt, Artificial Sequence
  Synthetic
acacugacauuuuguuagu

SEQ ID NO: 1723 - RNA, 19 nt, Artificial Sequence
  Synthetic
ucccugacaucuaugagaa

SEQ ID NO: 1724 - RNA, 19 nt, Artificial Sequence
  Synthetic
gacugaacuugaacacuga

SEQ ID NO: 1725 - RNA, 19 nt, Artificial Sequence
  Synthetic
gguggaaguggucaacgua

SEQ ID NO: 1726 - RNA, 19 nt, Artificial Sequence
  Synthetic
cuacagcuucucccaaaua

SEQ ID NO: 1727 - RNA, 19 nt, Artificial Sequence
  Synthetic
ggaccagccgccuugauga

SEQ ID NO: 1728 - RNA, 19 nt, Artificial Sequence
  Synthetic
gagggcauucaguacauaa

SEQ ID NO: 1729 - RNA, 19 nt, Artificial Sequence
  Synthetic
ugggaacagcucaucaauu

SEQ ID NO: 1730 - RNA, 19 nt, Artificial Sequence
  Synthetic
ucgagggcauucaguacau

SEQ ID NO: 1731 - RNA, 19 nt, Artificial Sequence
  Synthetic
gcaagaacaaggugacaca

SEQ ID NO: 1732 - RNA, 19 nt, Artificial Sequence
  Synthetic
gcggaacaauugagcaaga

SEQ ID NO: 1733 - RNA, 19 nt, Artificial Sequence
  Synthetic
acgcggaacaauugagcaa

SEQ ID NO: 1734 - RNA, 19 nt, Artificial Sequence
  Synthetic
ccagagacgcggaacaauu

SEQ ID NO: 1735 - RNA, 19 nt, Artificial Sequence
  Synthetic
ggaagaauauggagagagc

SEQ ID NO: 1736 - RNA, 19 nt, Artificial Sequence
  Synthetic
gaacaauugagcaagaaca

SEQ ID NO: 1737 - RNA, 19 nt, Artificial Sequence
  Synthetic
ugacaagacauuucaaaga

SEQ ID NO: 1738 - RNA, 19 nt, Artificial Sequence
  Synthetic
aagaacaaggugacacaua

SEQ ID NO: 1739 - RNA, 19 nt, Artificial Sequence
  Synthetic
ugaaggaagaauauggaga

SEQ ID NO: 1740 - RNA, 19 nt, Artificial Sequence
  Synthetic
gaacaaggugacacauauu

SEQ ID NO: 1741 - RNA, 19 nt, Artificial Sequence
  Synthetic
ggccuauguuggagggagu

SEQ ID NO: 1742 - RNA, 19 nt, Artificial Sequence
  Synthetic
ugacacuggugaucgcaua

SEQ ID NO: 1743 - RNA, 19 nt, Artificial Sequence
  Synthetic
cggcaguggcugaaggaag

SEQ ID NO: 1744 - RNA, 19 nt, Artificial Sequence
  Synthetic
gaguuaaauaccugugcau

SEQ ID NO: 1745 - RNA, 19 nt, Artificial Sequence
  Synthetic
caguaucggcaguggcuga

SEQ ID NO: 1746 - RNA, 19 nt, Artificial Sequence
  Synthetic
ggcagaagauggacgucaa

SEQ ID NO: 1747 - RNA, 19 nt, Artificial Sequence
  Synthetic
caucaaggccaacgacaca

SEQ ID NO: 1748 - RNA, 19 nt, Artificial Sequence
  Synthetic
cgucuguggcucaggacau

SEQ ID NO: 1749 - RNA, 19 nt, Artificial Sequence
  Synthetic
ucacauaccugggcaucaa

SEQ ID NO: 1750 - RNA, 19 nt, Artificial Sequence
  Synthetic
ccaacgacacacaggaguu

SEQ ID NO: 1751 - RNA, 19 nt, Artificial Sequence
  Synthetic
cuacaagugugucccaaca

SEQ ID NO: 1752 - RNA, 19 nt, Artificial Sequence
  Synthetic
ugaaagggcugccgacuuc

SEQ ID NO: 1753 - RNA, 19 nt, Artificial Sequence
  Synthetic
gagcugccauguuuaggaa

SEQ ID NO: 1754 - RNA, 19 nt, Artificial Sequence
  Synthetic
ugaccaggcuuuggcucaa

SEQ ID NO: 1755 - RNA, 19 nt, Artificial Sequence
  Synthetic
acaccaaugccaacuucua

SEQ ID NO: 1756 - RNA, 19 nt, Artificial Sequence
  Synthetic
gggagcacauaaagaagcu

SEQ ID NO: 1757 - RNA, 19 nt, Artificial Sequence
  Synthetic
ucaugcacgucaacaccaa

SEQ ID NO: 1758 - RNA, 19 nt, Artificial Sequence
  Synthetic
gaagauggacgucaagucu

SEQ ID NO: 1759 - RNA, 19 nt, Artificial Sequence
  Synthetic
uguccgagcugccauguuu

SEQ ID NO: 1760 - RNA, 19 nt, Artificial Sequence
  Synthetic
aguucaaccucagcgcuua

SEQ ID NO: 1761 - RNA, 19 nt, Artificial Sequence
  Synthetic
gcugagggcagguccuuca

SEQ ID NO: 1762 - RNA, 19 nt, Artificial Sequence
  Synthetic
caguuguccuguuucugua

SEQ ID NO: 1763 - RNA, 19 nt, Artificial Sequence
  Synthetic
ccagcucaaugacagacua

SEQ ID NO: 1764 - RNA, 19 nt, Artificial Sequence
  Synthetic
ccucagcgcuuacuuugaa

SEQ ID NO: 1765 - RNA, 19 nt, Artificial Sequence
  Synthetic
ccaaugccaacuucuacaa

SEQ ID NO: 1766 - RNA, 19 nt, Artificial Sequence
  Synthetic
guccuguuucuguaacuua

SEQ ID NO: 1767 - RNA, 19 nt, Artificial Sequence
  Synthetic
caaccucagcgcuuacuuu

SEQ ID NO: 1768 - RNA, 19 nt, Artificial Sequence
  Synthetic
acacaguccugggccacuu

SEQ ID NO: 1769 - RNA, 19 nt, Artificial Sequence
  Synthetic
gggcugccgacuucauuga

SEQ ID NO: 1770 - RNA, 19 nt, Artificial Sequence
  Synthetic
uacaaggacuccggcauca

SEQ ID NO: 1771 - RNA, 19 nt, Artificial Sequence
  Synthetic
gcagaagauggacgucaag

SEQ ID NO: 1772 - RNA, 19 nt, Artificial Sequence
  Synthetic
caacgacacacaggaguuc

SEQ ID NO: 1773 - RNA, 19 nt, Artificial Sequence
  Synthetic
guuaucgccuaccucauga

SEQ ID NO: 1774 - RNA, 19 nt, Artificial Sequence
  Synthetic
caacaccaaugccaacuuc

SEQ ID NO: 1775 - RNA, 19 nt, Artificial Sequence
  Synthetic
cuguuucuguaacuuauga

SEQ ID NO: 1776 - RNA, 19 nt, Artificial Sequence
  Synthetic
ggaagaaagggaagaauua

SEQ ID NO: 1777 - RNA, 19 nt, Artificial Sequence
  Synthetic
gcaauaaggacuccgaaua

SEQ ID NO: 1778 - RNA, 19 nt, Artificial Sequence
  Synthetic
acuccaacuuagagcaaua

SEQ ID NO: 1779 - RNA, 19 nt, Artificial Sequence
  Synthetic
gccaaggacuggaagcaua

SEQ ID NO: 1780 - RNA, 19 nt, Artificial Sequence
  Synthetic
aggaagaaagggaagaauu

SEQ ID NO: 1781 - RNA, 19 nt, Artificial Sequence
  Synthetic
ggaggaagggagcuggaaa

SEQ ID NO: 1782 - RNA, 19 nt, Artificial Sequence
  Synthetic
ccaaagcgcuccaagagaa

SEQ ID NO: 1783 - RNA, 19 nt, Artificial Sequence
  Synthetic
caguaaggcuugaagugau

SEQ ID NO: 1784 - RNA, 19 nt, Artificial Sequence
  Synthetic
agauguagguguaaauuga

SEQ ID NO: 1785 - RNA, 19 nt, Artificial Sequence
  Synthetic
aaagacagauguaggugua

SEQ ID NO: 1786 - RNA, 19 nt, Artificial Sequence
  Synthetic
ggaggcaguuccuggcuaa

SEQ ID NO: 1787 - RNA, 19 nt, Artificial Sequence
  Synthetic
ccaaggacuggaagcauaa

SEQ ID NO: 1788 - RNA, 19 nt, Artificial Sequence
  Synthetic
ggaagaauuagguuugaau

SEQ ID NO: 1789 - RNA, 19 nt, Artificial Sequence
  Synthetic
ugucguuguuguaguuaaa

SEQ ID NO: 1790 - RNA, 19 nt, Artificial Sequence
  Synthetic
agacagauguagguguaaa

SEQ ID NO: 1791 - RNA, 19 nt, Artificial Sequence
  Synthetic
ccacagagcccuuggaccu

SEQ ID NO: 1792 - RNA, 19 nt, Artificial Sequence
  Synthetic
aagcaaacucacuauguua

SEQ ID NO: 1793 - RNA, 19 nt, Artificial Sequence
  Synthetic
ggaggaagaaagggaagaa

SEQ ID NO: 1794 - RNA, 19 nt, Artificial Sequence
  Synthetic
guaacuaaagacagaugua

SEQ ID NO: 1795 - RNA, 19 nt, Artificial Sequence
  Synthetic
gagugaaauuugacccuuu

SEQ ID NO: 1796 - RNA, 19 nt, Artificial Sequence
  Synthetic
gggcaaagggaugagaaga

SEQ ID NO: 1797 - RNA, 19 nt, Artificial Sequence
  Synthetic
uggccuaccugaugaugaa

SEQ ID NO: 1798 - RNA, 19 nt, Artificial Sequence
  Synthetic
gguaguuucugcuuacaaa

SEQ ID NO: 1799 - RNA, 19 nt, Artificial Sequence
  Synthetic
cgacgaggccagccagaau

SEQ ID NO: 1800 - RNA, 19 nt, Artificial Sequence
  Synthetic
gcaucccaguggaagauaa

SEQ ID NO: 1801 - RNA, 19 nt, Artificial Sequence
  Synthetic
gaagaaaaguucacuccaa

SEQ ID NO: 1802 - RNA, 19 nt, Artificial Sequence
  Synthetic
ggaaguaaauggugucuug

SEQ ID NO: 1803 - RNA, 19 nt, Artificial Sequence
  Synthetic
gugcaagguagcaugauga

SEQ ID NO: 1804 - RNA, 19 nt, Artificial Sequence
  Synthetic
caagagaaagugccaggaa

SEQ ID NO: 1805 - RNA, 19 nt, Artificial Sequence
  Synthetic
gggaugagaagacaaguuu

SEQ ID NO: 1806 - RNA, 19 nt, Artificial Sequence
  Synthetic
aagagaagauugagaguga

SEQ ID NO: 1807 - RNA, 19 nt, Artificial Sequence
  Synthetic
gaagaaaagcaguauguua

SEQ ID NO: 1808 - RNA, 19 nt, Artificial Sequence
  Synthetic
gaagauugagagugagaga

SEQ ID NO: 1809 - RNA, 19 nt, Artificial Sequence
  Synthetic
guagauuccaggaggagaa

SEQ ID NO: 1810 - RNA, 19 nt, Artificial Sequence
  Synthetic
gagaagauugagagugaga

SEQ ID NO: 1811 - RNA, 19 nt, Artificial Sequence
  Synthetic
gagaaaaggcaguuaugaa

SEQ ID NO: 1812 - RNA, 19 nt, Artificial Sequence
  Synthetic
cagcaacgugggagaaaga

SEQ ID NO: 1813 - RNA, 19 nt, Artificial Sequence
  Synthetic
guagcaagauguuggcuuu

SEQ ID NO: 1814 - RNA, 19 nt, Artificial Sequence
  Synthetic
gaaggaaggccaagccauu

SEQ ID NO: 1815 - RNA, 19 nt, Artificial Sequence
  Synthetic
ccacuuucaagaagcaaua

SEQ ID NO: 1816 - RNA, 19 nt, Artificial Sequence
  Synthetic
cggaauauccugaguguug

SEQ ID NO: 1817 - RNA, 19 nt, Artificial Sequence
  Synthetic
cccaagagcaacugugauu

SEQ ID NO: 1818 - RNA, 19 nt, Artificial Sequence
  Synthetic
ucacaagagaagauugaga

SEQ ID NO: 1819 - RNA, 19 nt, Artificial Sequence
  Synthetic
agacuuucuacucggaaua

SEQ ID NO: 1820 - RNA, 19 nt, Artificial Sequence
  Synthetic
cagcagaagcccuguggca

SEQ ID NO: 1821 - RNA, 19 nt, Artificial Sequence
  Synthetic
gaggcaagguccuggucca

SEQ ID NO: 1822 - RNA, 19 nt, Artificial Sequence
  Synthetic
ggagcauggucucgcccaa

SEQ ID NO: 1823 - RNA, 19 nt, Artificial Sequence
  Synthetic
caauaaauaccugcagcaa

SEQ ID NO: 1824 - RNA, 19 nt, Artificial Sequence
  Synthetic
caaauggaucccuguggaa

SEQ ID NO: 1825 - RNA, 19 nt, Artificial Sequence
  Synthetic
aguguugcguggauguaaa

SEQ ID NO: 1826 - RNA, 19 nt, Artificial Sequence
  Synthetic
ccauuucacaagagaagau

SEQ ID NO: 1827 - RNA, 19 nt, Artificial Sequence
  Synthetic
gaaggguacuugcuaggua

SEQ ID NO: 1828 - RNA, 19 nt, Artificial Sequence
  Synthetic
gagacuuucuacucggaau

SEQ ID NO: 1829 - RNA, 19 nt, Artificial Sequence
  Synthetic
aaacugggauggaggaauc

SEQ ID NO: 1830 - RNA, 19 nt, Artificial Sequence
  Synthetic
acuguggacuucugggauu

SEQ ID NO: 1831 - RNA, 19 nt, Artificial Sequence
  Synthetic
caagagcaacugugauuuu

SEQ ID NO: 1832 - RNA, 19 nt, Artificial Sequence
  Synthetic
ucaccaggcuugcaaauga

SEQ ID NO: 1833 - RNA, 19 nt, Artificial Sequence
  Synthetic
gcagaagcccuguggcaac

SEQ ID NO: 1834 - RNA, 19 nt, Artificial Sequence
  Synthetic
gcaacgugguacuacuuuu

SEQ ID NO: 1835 - RNA, 19 nt, Artificial Sequence
  Synthetic
ccugaaauguuguguagac

SEQ ID NO: 1836 - RNA, 19 nt, Artificial Sequence
  Synthetic
cggaauugguuaauacuaa

SEQ ID NO: 1837 - RNA, 19 nt, Artificial Sequence
  Synthetic
aggacaugcuguauagaua

SEQ ID NO: 1838 - RNA, 19 nt, Artificial Sequence
  Synthetic
cggaaauggcgaucagcaa

SEQ ID NO: 1839 - RNA, 19 nt, Artificial Sequence
  Synthetic
ucaagaagcucaaggacga

SEQ ID NO: 1840 - RNA, 19 nt, Artificial Sequence
  Synthetic
gggaaggcgaggcggaauu

SEQ ID NO: 1841 - RNA, 19 nt, Artificial Sequence
  Synthetic
caggagaguuuaaauacaa

SEQ ID NO: 1842 - RNA, 19 nt, Artificial Sequence
  Synthetic
acgcaggagaguuuaaaua

SEQ ID NO: 1843 - RNA, 19 nt, Artificial Sequence
  Synthetic
gaacgaugccuaugacauu

SEQ ID NO: 1844 - RNA, 19 nt, Artificial Sequence
  Synthetic
ugagaacgcaggagaguuu

SEQ ID NO: 1845 - RNA, 19 nt, Artificial Sequence
  Synthetic
agagauucauugacacuaa

SEQ ID NO: 1846 - RNA, 19 nt, Artificial Sequence
  Synthetic
uagaggagccaaagagaga

SEQ ID NO: 1847 - RNA, 19 nt, Artificial Sequence
  Synthetic
cguucuaccuggaagauga

SEQ ID NO: 1848 - RNA, 19 nt, Artificial Sequence
  Synthetic
gcagcuucauugagagaga

SEQ ID NO: 1849 - RNA, 19 nt, Artificial Sequence
  Synthetic
gggaaagacaccaaaucau

SEQ ID NO: 1850 - RNA, 19 nt, Artificial Sequence
  Synthetic
ucggaucacuggagccaaa

SEQ ID NO: 1851 - RNA, 19 nt, Artificial Sequence
  Synthetic
agauacaggcaguagguuu

SEQ ID NO: 1852 - RNA, 19 nt, Artificial Sequence
  Synthetic
gcaggagaguuuaaauaca

SEQ ID NO: 1853 - RNA, 19 nt, Artificial Sequence
  Synthetic
ugacaguguuuguuugaau

SEQ ID NO: 1854 - RNA, 19 nt, Artificial Sequence
  Synthetic
uggcuuaccuuaugcagaa

SEQ ID NO: 1855 - RNA, 19 nt, Artificial Sequence
  Synthetic
ccgacacaguggugcucua

SEQ ID NO: 1856 - RNA, 19 nt, Artificial Sequence
  Synthetic
gguaggagcauguguucuu

SEQ ID NO: 1857 - RNA, 19 nt, Artificial Sequence
  Synthetic
acuucaacuucauggguca

SEQ ID NO: 1858 - RNA, 19 nt, Artificial Sequence
  Synthetic
gaggagccaaagagagauu

SEQ ID NO: 1859 - RNA, 19 nt, Artificial Sequence
  Synthetic
ugagagagauucauugaca

SEQ ID NO: 1860 - RNA, 19 nt, Artificial Sequence
  Synthetic
aaagggagaaagagcagua

SEQ ID NO: 1861 - RNA, 19 nt, Artificial Sequence
  Synthetic
cuuccaaccagaauguaua

SEQ ID NO: 1862 - RNA, 19 nt, Artificial Sequence
  Synthetic
gauuagaagccgcuagacu

SEQ ID NO: 1863 - RNA, 19 nt, Artificial Sequence
  Synthetic
agagagaaccuccggcuuu

SEQ ID NO: 1864 - RNA, 19 nt, Artificial Sequence
  Synthetic
gaaauggcgaucagcaaga

SEQ ID NO: 1865 - RNA, 19 nt, Artificial Sequence
  Synthetic
caguaugccacuucuuaaa

SEQ ID NO: 1866 - RNA, 19 nt, Artificial Sequence
  Synthetic
aaguauggcaucaaguaua

SEQ ID NO: 1867 - RNA, 19 nt, Artificial Sequence
  Synthetic
acgacuuugucaagaggaa

SEQ ID NO: 1868 - RNA, 19 nt, Artificial Sequence
  Synthetic
cuaagcagcccgugcgaca

SEQ ID NO: 1869 - RNA, 19 nt, Artificial Sequence
  Synthetic
gcaaguauggcaucaagua

SEQ ID NO: 1870 - RNA, 19 nt, Artificial Sequence
  Synthetic
cagcagugccaccgaguca

SEQ ID NO: 1871 - RNA, 19 nt, Artificial Sequence
  Synthetic
gcgccaaggacuccaccaa

SEQ ID NO: 1872 - RNA, 19 nt, Artificial Sequence
  Synthetic
gcaucaaguauauccucaa

SEQ ID NO: 1873 - RNA, 19 nt, Artificial Sequence
  Synthetic
cgacuuugucaagaggaaa

SEQ ID NO: 1874 - RNA, 19 nt, Artificial Sequence
  Synthetic
aguauggcaucaaguauau

SEQ ID NO: 1875 - RNA, 19 nt, Artificial Sequence
  Synthetic
agaugaaccugucacucaa

SEQ ID NO: 1876 - RNA, 19 nt, Artificial Sequence
  Synthetic
gguuucaacaaguuucaaa

SEQ ID NO: 1877 - RNA, 19 nt, Artificial Sequence
  Synthetic
ggacgugcucggcaaguau

SEQ ID NO: 1878 - RNA, 19 nt, Artificial Sequence
  Synthetic
caaguauggcaucaaguau

SEQ ID NO: 1879 - RNA, 19 nt, Artificial Sequence
  Synthetic
aaguauauccucaauguca

SEQ ID NO: 1880 - RNA, 19 nt, Artificial Sequence
  Synthetic
aagaugaaccugucacuca

SEQ ID NO: 1881 - RNA, 19 nt, Artificial Sequence
  Synthetic
caucagcuucauugacgaa

SEQ ID NO: 1882 - RNA, 19 nt, Artificial Sequence
  Synthetic
ccuccaaggugguuucaac

SEQ ID NO: 1883 - RNA, 19 nt, Artificial Sequence
  Synthetic
gcggcgaguucaccuacaa

SEQ ID NO: 1884 - RNA, 19 nt, Artificial Sequence
  Synthetic
caacgacgccuacgacuuu

SEQ ID NO: 1885 - RNA, 19 nt, Artificial Sequence
  Synthetic
caucaaguauauccucaau

SEQ ID NO: 1886 - RNA, 19 nt, Artificial Sequence
  Synthetic
ucaacgacgccuacgacuu

SEQ ID NO: 1887 - RNA, 19 nt, Artificial Sequence
  Synthetic
ucaaguauauccucaaugu

SEQ ID NO: 1888 - RNA, 19 nt, Artificial Sequence
  Synthetic
caaggugguuucaacaagu

SEQ ID NO: 1889 - RNA, 19 nt, Artificial Sequence
  Synthetic
ggcaucagccgcucaguga

SEQ ID NO: 1890 - RNA, 19 nt, Artificial Sequence
  Synthetic
uggacgugcucggcaagua

SEQ ID NO: 1891 - RNA, 19 nt, Artificial Sequence
  Synthetic
ccaccaaccacaaccuguu

SEQ ID NO: 1892 - RNA, 19 nt, Artificial Sequence
  Synthetic
ccaccgugcugcucuacga

SEQ ID NO: 1893 - RNA, 19 nt, Artificial Sequence
  Synthetic
gcagaagaugaaccuguca

SEQ ID NO: 1894 - RNA, 19 nt, Artificial Sequence
  Synthetic
ccaaggugguuucaacaag

SEQ ID NO: 1895 - RNA, 19 nt, Artificial Sequence
  Synthetic
gccagaaccucucccaguu

SEQ ID NO: 1896 - RNA, 19 nt, Artificial Sequence
  Synthetic
ggaaggugauggaugccaa

SEQ ID NO: 1897 - RNA, 19 nt, Artificial Sequence
  Synthetic
ccuacagguucgugaagga

SEQ ID NO: 1898 - RNA, 19 nt, Artificial Sequence
  Synthetic
gggugguccucgagcucua

SEQ ID NO: 1899 - RNA, 19 nt, Artificial Sequence
  Synthetic
cagccaggcccguuauaaa

SEQ ID NO: 1900 - RNA, 19 nt, Artificial Sequence
  Synthetic
cacaggacgugguggucua

SEQ ID NO: 1901 - RNA, 19 nt, Artificial Sequence
  Synthetic
aggaaacacugcugaccuu

SEQ ID NO: 1902 - RNA, 19 nt, Artificial Sequence
  Synthetic
aacgacaacuacugugaaa

SEQ ID NO: 1903 - RNA, 19 nt, Artificial Sequence
  Synthetic
gagcgcugccacagggaau

SEQ ID NO: 1904 - RNA, 19 nt, Artificial Sequence
  Synthetic
cauacguuucuaagcaaua

SEQ ID NO: 1905 - RNA, 19 nt, Artificial Sequence
  Synthetic
gaauaagcuacguccucaa

SEQ ID NO: 1906 - RNA, 19 nt, Artificial Sequence
  Synthetic
caaagaaagguaaaugguu

SEQ ID NO: 1907 - RNA, 19 nt, Artificial Sequence
  Synthetic
uggaguucgaggagggcau

SEQ ID NO: 1908 - RNA, 19 nt, Artificial Sequence
  Synthetic
ugcaaaggcugccgagcuu

SEQ ID NO: 1909 - RNA, 19 nt, Artificial Sequence
  Synthetic
gcaaagaaagguaaauggu

SEQ ID NO: 1910 - RNA, 19 nt, Artificial Sequence
  Synthetic
gcaaugauuuggcaacagu

SEQ ID NO: 1911 - RNA, 19 nt, Artificial Sequence
  Synthetic
cuaaacaaggaucugauga

SEQ ID NO: 1912 - RNA, 19 nt, Artificial Sequence
  Synthetic
aggacgugguggucuauga

SEQ ID NO: 1913 - RNA, 19 nt, Artificial Sequence
  Synthetic
ggugauggaugccaagaag

SEQ ID NO: 1914 - RNA, 19 nt, Artificial Sequence
  Synthetic
acaaguccaucgaguucau

SEQ ID NO: 1915 - RNA, 19 nt, Artificial Sequence
  Synthetic
gcagcugccagauggaguu

SEQ ID NO: 1916 - RNA, 19 nt, Artificial Sequence
  Synthetic
gcugccagauggaguucga

SEQ ID NO: 1917 - RNA, 19 nt, Artificial Sequence
  Synthetic
aacauacguuucuaagcaa

SEQ ID NO: 1918 - RNA, 19 nt, Artificial Sequence
  Synthetic
ucaacgacaacuacuguga

SEQ ID NO: 1919 - RNA, 19 nt, Artificial Sequence
  Synthetic
ugucugguauuuaaacuga

SEQ ID NO: 1920 - RNA, 19 nt, Artificial Sequence
  Synthetic
uaaacaaggaucugaugac

SEQ ID NO: 1921 - RNA, 19 nt, Artificial Sequence
  Synthetic
caacgacaacuacugugaa

SEQ ID NO: 1922 - RNA, 19 nt, Artificial Sequence
  Synthetic
gccgagcuuucgugcacuu

SEQ ID NO: 1923 - RNA, 19 nt, Artificial Sequence
  Synthetic
gcagccaggcccguuauaa

SEQ ID NO: 1924 - RNA, 19 nt, Artificial Sequence
  Synthetic
ggaaacacugcugaccuuu

SEQ ID NO: 1925 - RNA, 19 nt, Artificial Sequence
  Synthetic
gugcucagcuccgucaaca

SEQ ID NO: 1926 - RNA, 19 nt, Artificial Sequence
  Synthetic
cgagaagaauggugacuuu

SEQ ID NO: 1927 - RNA, 19 nt, Artificial Sequence
  Synthetic
gggccaagcugcagacaca

SEQ ID NO: 1928 - RNA, 19 nt, Artificial Sequence
  Synthetic
aggaagaagucuaacaucu

SEQ ID NO: 1929 - RNA, 19 nt, Artificial Sequence
  Synthetic
gaucuaugcuuguuuguuu

SEQ ID NO: 1930 - RNA, 19 nt, Artificial Sequence
  Synthetic
gucaagaggaagaagucua

SEQ ID NO: 1931 - RNA, 19 nt, Artificial Sequence
  Synthetic
uggccuaccucaugcagaa

SEQ ID NO: 1932 - RNA, 19 nt, Artificial Sequence
  Synthetic
ccuggagccuggagaggau

SEQ ID NO: 1933 - RNA, 19 nt, Artificial Sequence
  Synthetic
ucaagaggaagaagucuaa

SEQ ID NO: 1934 - RNA, 19 nt, Artificial Sequence
  Synthetic
cgacugcucugaugcggaa

SEQ ID NO: 1935 - RNA, 19 nt, Artificial Sequence
  Synthetic
cagggaggcuucagcagau

SEQ ID NO: 1936 - RNA, 19 nt, Artificial Sequence
  Synthetic
aagaagaaggccucacuuu

SEQ ID NO: 1937 - RNA, 19 nt, Artificial Sequence
  Synthetic
agaagaaggccucacuuuu

SEQ ID NO: 1938 - RNA, 19 nt, Artificial Sequence
  Synthetic
gcagacacacacagucauu

SEQ ID NO: 1939 - RNA, 19 nt, Artificial Sequence
  Synthetic
gagugaggguggccaaacu

SEQ ID NO: 1940 - RNA, 19 nt, Artificial Sequence
  Synthetic
gggcugccguccuaaucaa

SEQ ID NO: 1941 - RNA, 19 nt, Artificial Sequence
  Synthetic
ggaagaagucuaacaucuc

SEQ ID NO: 1942 - RNA, 19 nt, Artificial Sequence
  Synthetic
ggagaggaucuaugcuugu

SEQ ID NO: 1943 - RNA, 19 nt, Artificial Sequence
  Synthetic
agaagaauggugacuuuca

SEQ ID NO: 1944 - RNA, 19 nt, Artificial Sequence
  Synthetic
ggcaguugcuggacuuuga

SEQ ID NO: 1945 - RNA, 19 nt, Artificial Sequence
  Synthetic
agacacacacagucauuca

SEQ ID NO: 1946 - RNA, 19 nt, Artificial Sequence
  Synthetic
agaggaagaagucuaacau

SEQ ID NO: 1947 - RNA, 19 nt, Artificial Sequence
  Synthetic
ggaagaagaaggccucacu

SEQ ID NO: 1948 - RNA, 19 nt, Artificial Sequence
  Synthetic
cuggugggcuguuuuguuu

SEQ ID NO: 1949 - RNA, 19 nt, Artificial Sequence
  Synthetic
uggagagccuggccaaacu

SEQ ID NO: 1950 - RNA, 19 nt, Artificial Sequence
  Synthetic
ggagaggcguuugccauca

SEQ ID NO: 1951 - RNA, 19 nt, Artificial Sequence
  Synthetic
gaagaaggccucacuuuug

SEQ ID NO: 1952 - RNA, 19 nt, Artificial Sequence
  Synthetic
ccaccucguugcacuggau

SEQ ID NO: 1953 - RNA, 19 nt, Artificial Sequence
  Synthetic
gaggaagaagucuaacauc

SEQ ID NO: 1954 - RNA, 19 nt, Artificial Sequence
  Synthetic
aaacugggcauccgcuaca

SEQ ID NO: 1955 - RNA, 19 nt, Artificial Sequence
  Synthetic
cacacacagucauucauuu

SEQ ID NO: 1956 - RNA, 19 nt, Artificial Sequence
  Synthetic
ggagaaagcuguugugaaa

SEQ ID NO: 1957 - RNA, 19 nt, Artificial Sequence
  Synthetic
gaugaagauuauagaggaa

SEQ ID NO: 1958 - RNA, 19 nt, Artificial Sequence
  Synthetic
ccucagugaaguagcaaua

SEQ ID NO: 1959 - RNA, 19 nt, Artificial Sequence
  Synthetic
gguacaaaaucuugcauaa

SEQ ID NO: 1960 - RNA, 19 nt, Artificial Sequence
  Synthetic
ggacugauucuguggcuua

SEQ ID NO: 1961 - RNA, 19 nt, Artificial Sequence
  Synthetic
uguaggagcuggugucaua

SEQ ID NO: 1962 - RNA, 19 nt, Artificial Sequence
  Synthetic
aggaaauguugguguugua

SEQ ID NO: 1963 - RNA, 19 nt, Artificial Sequence
  Synthetic
gcaaauuguacuaguugua

SEQ ID NO: 1964 - RNA, 19 nt, Artificial Sequence
  Synthetic
uugcauaagcugaacuaaa

SEQ ID NO: 1965 - RNA, 19 nt, Artificial Sequence
  Synthetic
gagguauguuugugaaaga

SEQ ID NO: 1966 - RNA, 19 nt, Artificial Sequence
  Synthetic
aaggagagauuaaagguau

SEQ ID NO: 1967 - RNA, 19 nt, Artificial Sequence
  Synthetic
cagaaauagaagaaguuca

SEQ ID NO: 1968 - RNA, 19 nt, Artificial Sequence
  Synthetic
ggucaggcuuggcugcaaa

SEQ ID NO: 1969 - RNA, 19 nt, Artificial Sequence
  Synthetic
cagaaaacaagaagucaua

SEQ ID NO: 1970 - RNA, 19 nt, Artificial Sequence
  Synthetic
gcucauuugcgaacggauu

SEQ ID NO: 1971 - RNA, 19 nt, Artificial Sequence
  Synthetic
uggagaaagcuguugugaa

SEQ ID NO: 1972 - RNA, 19 nt, Artificial Sequence
  Synthetic
uagaagaaguucaagccuu

SEQ ID NO: 1973 - RNA, 19 nt, Artificial Sequence
  Synthetic
gguuuguucccuugaauuu

SEQ ID NO: 1974 - RNA, 19 nt, Artificial Sequence
  Synthetic
agaugaagauuauagagga

SEQ ID NO: 1975 - RNA, 19 nt, Artificial Sequence
  Synthetic
gauaaauccucuauugacu

SEQ ID NO: 1976 - RNA, 19 nt, Artificial Sequence
  Synthetic
gaaaacggacauucagaua

SEQ ID NO: 1977 - RNA, 19 nt, Artificial Sequence
  Synthetic
uggcuuaccuugauuaaca

SEQ ID NO: 1978 - RNA, 19 nt, Artificial Sequence
  Synthetic
caauaccaccuauggagaa

SEQ ID NO: 1979 - RNA, 19 nt, Artificial Sequence
  Synthetic
caucaggcaaauuguacua

SEQ ID NO: 1980 - RNA, 19 nt, Artificial Sequence
  Synthetic
uguacagugccuaugauua

SEQ ID NO: 1981 - RNA, 19 nt, Artificial Sequence
  Synthetic
uagaggaaauguugguguu

SEQ ID NO: 1982 - RNA, 19 nt, Artificial Sequence
  Synthetic
cauaccagguugggcuaua

SEQ ID NO: 1983 - RNA, 19 nt, Artificial Sequence
  Synthetic
ccuucuggguguuauggaa

SEQ ID NO: 1984 - RNA, 19 nt, Artificial Sequence
  Synthetic
cuuuauugauguaggagcu

SEQ ID NO: 1985 - RNA, 19 nt, Artificial Sequence
  Synthetic
aaaggagagauuaaaggua

SEQ ID NO: 1986 - RNA, 19 nt, Artificial Sequence
  Synthetic
cuaacaagcuguaaagaua

SEQ ID NO: 1987 - RNA, 19 nt, Artificial Sequence
  Synthetic
gaucagauguggaaauuaa

SEQ ID NO: 1988 - RNA, 19 nt, Artificial Sequence
  Synthetic
ccucauggguugaagaauu

SEQ ID NO: 1989 - RNA, 19 nt, Artificial Sequence
  Synthetic
agaaagaaauggugucaau

SEQ ID NO: 1990 - RNA, 19 nt, Artificial Sequence
  Synthetic
gaaaggaaauauuguggaa

SEQ ID NO: 1991 - RNA, 19 nt, Artificial Sequence
  Synthetic
gcauagaaccagaacauau

SEQ ID NO: 1992 - RNA, 19 nt, Artificial Sequence
  Synthetic
gcgaaaguaugcugaagaa

SEQ ID NO: 1993 - RNA, 19 nt, Artificial Sequence
  Synthetic
gagaaaagguugaccagaa

SEQ ID NO: 1994 - RNA, 19 nt, Artificial Sequence
  Synthetic
auucagguguggugagaaa

SEQ ID NO: 1995 - RNA, 19 nt, Artificial Sequence
  Synthetic
cuacaaauauagugccaau

SEQ ID NO: 1996 - RNA, 19 nt, Artificial Sequence
  Synthetic
acaagaaaccccagagaua

SEQ ID NO: 1997 - RNA, 19 nt, Artificial Sequence
  Synthetic
guacaaaggagaaccaauu

SEQ ID NO: 1998 - RNA, 19 nt, Artificial Sequence
  Synthetic
uuagagaaucugaggcaaa

SEQ ID NO: 1999 - RNA, 19 nt, Artificial Sequence
  Synthetic
gcagaagagaagauuauua

SEQ ID NO: 2000 - RNA, 19 nt, Artificial Sequence
  Synthetic
gcauugaaucccucagaaa

SEQ ID NO: 2001 - RNA, 19 nt, Artificial Sequence
  Synthetic
gugcauagaaccagaacau

SEQ ID NO: 2002 - RNA, 19 nt, Artificial Sequence
  Synthetic
gcugauggauggucugaaa

SEQ ID NO: 2003 - RNA, 19 nt, Artificial Sequence
  Synthetic
gaauugagcccuugacauu

SEQ ID NO: 2004 - RNA, 19 nt, Artificial Sequence
  Synthetic
uggcagaagagaagauuau

SEQ ID NO: 2005 - RNA, 19 nt, Artificial Sequence
  Synthetic
ccuauaccguggacagaaa

SEQ ID NO: 2006 - RNA, 19 nt, Artificial Sequence
  Synthetic
gaaccaugugagagcauua

SEQ ID NO: 2007 - RNA, 19 nt, Artificial Sequence
  Synthetic
cgucagugguccuguguuu

SEQ ID NO: 2008 - RNA, 19 nt, Artificial Sequence
  Synthetic
uuaaagugguucuggauau

SEQ ID NO: 2009 - RNA, 19 nt, Artificial Sequence
  Synthetic
aaagaagagucauccguaa

SEQ ID NO: 2010 - RNA, 19 nt, Artificial Sequence
  Synthetic
gaaaccaagcugugccaaa

SEQ ID NO: 2011 - RNA, 19 nt, Artificial Sequence
  Synthetic
gcaugaaacuuuacccuau

SEQ ID NO: 2012 - RNA, 19 nt, Artificial Sequence
  Synthetic
gugacuaucuuuaugagaa

SEQ ID NO: 2013 - RNA, 19 nt, Artificial Sequence
  Synthetic
cauagaaccagaacauaua

SEQ ID NO: 2014 - RNA, 19 nt, Artificial Sequence
  Synthetic
ggcaaacaguagacuuaua

SEQ ID NO: 2015 - RNA, 19 nt, Artificial Sequence
  Synthetic
uggcauaaucgacaauaaa

SEQ ID NO: 2016 - RNA, 19 nt, Artificial Sequence
  Synthetic
gaguagagcuuguaauaaa

SEQ ID NO: 2017 - RNA, 19 nt, Artificial Sequence
  Synthetic
gaaagugguuauagugaaa

SEQ ID NO: 2018 - RNA, 19 nt, Artificial Sequence
  Synthetic
augauaagguagagccaaa

SEQ ID NO: 2019 - RNA, 19 nt, Artificial Sequence
  Synthetic
acagaagaauugaggauau

SEQ ID NO: 2020 - RNA, 19 nt, Artificial Sequence
  Synthetic
agguagagccaaagaacaa

SEQ ID NO: 2021 - RNA, 19 nt, Artificial Sequence
  Synthetic
gcucagaggacgaaucaaa

SEQ ID NO: 2022 - RNA, 19 nt, Artificial Sequence
  Synthetic
agacauaccugcauacaua

SEQ ID NO: 2023 - RNA, 19 nt, Artificial Sequence
  Synthetic
aggaagaauucgauccaaa

SEQ ID NO: 2024 - RNA, 19 nt, Artificial Sequence
  Synthetic
ccuaagaggagacaggaaa

SEQ ID NO: 2025 - RNA, 19 nt, Artificial Sequence
  Synthetic
acuaauaccuucaggccaa

SEQ ID NO: 2026 - RNA, 19 nt, Artificial Sequence
  Synthetic
caacagaagaauugaggau

SEQ ID NO: 2027 - RNA, 19 nt, Artificial Sequence
  Synthetic
ggaaagaaauggaguuaac

SEQ ID NO: 2028 - RNA, 19 nt, Artificial Sequence
  Synthetic
gcagcaaagucaugccuaa

SEQ ID NO: 2029 - RNA, 19 nt, Artificial Sequence
  Synthetic
cauaugagagcgagauuua

SEQ ID NO: 2030 - RNA, 19 nt, Artificial Sequence
  Synthetic
ggucaaccgcuauggauua

SEQ ID NO: 2031 - RNA, 19 nt, Artificial Sequence
  Synthetic
uagaagaacucaugaagau

SEQ ID NO: 2032 - RNA, 19 nt, Artificial Sequence
  Synthetic
auuaauggauggacugaaa

SEQ ID NO: 2033 - RNA, 19 nt, Artificial Sequence
  Synthetic
gguuauggcccaacauuua

SEQ ID NO: 2034 - RNA, 19 nt, Artificial Sequence
  Synthetic
ggaaauaaaggccgcagaa

SEQ ID NO: 2035 - RNA, 19 nt, Artificial Sequence
  Synthetic
ccaaagaaaagaagaagaa

SEQ ID NO: 2036 - RNA, 19 nt, Artificial Sequence
  Synthetic
cuaagagaccuaagaggaa

SEQ ID NO: 2037 - RNA, 19 nt, Artificial Sequence
  Synthetic
gccuggaacucuaggaaga

SEQ ID NO: 2038 - RNA, 19 nt, Artificial Sequence
  Synthetic
auaagaaaccaucaggaaa

SEQ ID NO: 2039 - RNA, 19 nt, Artificial Sequence
  Synthetic
caaagaacaaguuggauga

SEQ ID NO: 2040 - RNA, 19 nt, Artificial Sequence
  Synthetic
ggagaguaguuauggcuca

SEQ ID NO: 2041 - RNA, 19 nt, Artificial Sequence
  Synthetic
ggugaaagcuggaacauuc

SEQ ID NO: 2042 - RNA, 19 nt, Artificial Sequence
  Synthetic
ucugcgagggcgagagaaa

SEQ ID NO: 2043 - RNA, 19 nt, Artificial Sequence
  Synthetic
aagaaauaugcuucggaaa

SEQ ID NO: 2044 - RNA, 19 nt, Artificial Sequence
  Synthetic
ccucacgagcggagaauau

SEQ ID NO: 2045 - RNA, 19 nt, Artificial Sequence
  Synthetic
cugaguagagcuuguaaua

SEQ ID NO: 2046 - RNA, 19 nt, Artificial Sequence
  Synthetic
gaucagaaguggcuauaaa

SEQ ID NO: 2047 - RNA, 19 nt, Artificial Sequence
  Synthetic
cgaauauggaugugcaaua

SEQ ID NO: 2048 - RNA, 19 nt, Artificial Sequence
  Synthetic
cugaggaaauuguuagaaa

SEQ ID NO: 2049 - RNA, 19 nt, Artificial Sequence
  Synthetic
ggugauugcugcugggauu

SEQ ID NO: 2050 - RNA, 19 nt, Artificial Sequence
  Synthetic
gaucaugucacuuggauua

SEQ ID NO: 2051 - RNA, 19 nt, Artificial Sequence
  Synthetic
ccucauggcuggaagaaaa

SEQ ID NO: 2052 - RNA, 19 nt, Artificial Sequence
  Synthetic
ggaauaugucaguggauuu

SEQ ID NO: 2053 - RNA, 19 nt, Artificial Sequence
  Synthetic
cagaguaauuaaagccuua

SEQ ID NO: 2054 - RNA, 19 nt, Artificial Sequence
  Synthetic
gcacauggacccaguuuua

SEQ ID NO: 2055 - RNA, 19 nt, Artificial Sequence
  Synthetic
cagcaacagugaaaguaaa

SEQ ID NO: 2056 - RNA, 19 nt, Artificial Sequence
  Synthetic
aauuaaagccuuacaggua

SEQ ID NO: 2057 - RNA, 19 nt, Artificial Sequence
  Synthetic
gcugaaagacccagguuuu

SEQ ID NO: 2058 - RNA, 19 nt, Artificial Sequence
  Synthetic
gagcuguccugaagguaaa

SEQ ID NO: 2059 - RNA, 19 nt, Artificial Sequence
  Synthetic
augcagaggaggugucaaa

SEQ ID NO: 2060 - RNA, 19 nt, Artificial Sequence
  Synthetic
cauccgagcucauaauaua

SEQ ID NO: 2061 - RNA, 19 nt, Artificial Sequence
  Synthetic
ggauggauuuagagcugaa

SEQ ID NO: 2062 - RNA, 19 nt, Artificial Sequence
  Synthetic
gguaguagaucaugcuuuu

SEQ ID NO: 2063 - RNA, 19 nt, Artificial Sequence
  Synthetic
ucaaaauacaugagagcua

SEQ ID NO: 2064 - RNA, 19 nt, Artificial Sequence
  Synthetic
aauaacagcaacagugaaa

SEQ ID NO: 2065 - RNA, 19 nt, Artificial Sequence
  Synthetic
acagaaagaaauggaguaa

SEQ ID NO: 2066 - RNA, 19 nt, Artificial Sequence
  Synthetic
ccacaguguucuucuuaua

SEQ ID NO: 2067 - RNA, 19 nt, Artificial Sequence
  Synthetic
agagaagacugaaguugaa

SEQ ID NO: 2068 - RNA, 19 nt, Artificial Sequence
  Synthetic
agucagugccagaguaauu

SEQ ID NO: 2069 - RNA, 19 nt, Artificial Sequence
  Synthetic
guaacaagauggaauacau

SEQ ID NO: 2070 - RNA, 19 nt, Artificial Sequence
  Synthetic
cuauaagaguguuugccaa

SEQ ID NO: 2071 - RNA, 19 nt, Artificial Sequence
  Synthetic
gaauauggaugugcaauaa

SEQ ID NO: 2072 - RNA, 19 nt, Artificial Sequence
  Synthetic
uggaauacaugacugauua

SEQ ID NO: 2073 - RNA, 19 nt, Artificial Sequence
  Synthetic
ggacccaguuuuaaagaga

SEQ ID NO: 2074 - RNA, 19 nt, Artificial Sequence
  Synthetic
agaagaaauaacagcaaca

SEQ ID NO: 2075 - RNA, 19 nt, Artificial Sequence
  Synthetic
caagaagaaauaacagcaa

SEQ ID NO: 2076 - RNA, 19 nt, Artificial Sequence
  Synthetic
gaacagagguuuauaacaa

SEQ ID NO: 2077 - RNA, 19 nt, Artificial Sequence
  Synthetic
gaaacuagguugugacaga

SEQ ID NO: 2078 - RNA, 19 nt, Artificial Sequence
  Synthetic
gcacacagaucucaggaaa

SEQ ID NO: 2079 - RNA, 19 nt, Artificial Sequence
  Synthetic
ggucauaaguuaacuguau

SEQ ID NO: 2080 - RNA, 19 nt, Artificial Sequence
  Synthetic
agacaaagaacuuagacua

SEQ ID NO: 2081 - RNA, 19 nt, Artificial Sequence
  Synthetic
cugauuaucugaagaacua

SEQ ID NO: 2082 - RNA, 19 nt, Artificial Sequence
  Synthetic
aggaauggcauaagaauuu

SEQ ID NO: 2083 - RNA, 19 nt, Artificial Sequence
  Synthetic
auacggaccugaagauaaa

SEQ ID NO: 2084 - RNA, 19 nt, Artificial Sequence
  Synthetic
gcucugugaugguaaauaa

SEQ ID NO: 2085 - RNA, 19 nt, Artificial Sequence
  Synthetic
gcuuaaugccuuuauguaa

SEQ ID NO: 2086 - RNA, 19 nt, Artificial Sequence
  Synthetic
ccaaucagcuucaggaaaa

SEQ ID NO: 2087 - RNA, 19 nt, Artificial Sequence
  Synthetic
ggacaauugugcuaaauga

SEQ ID NO: 2088 - RNA, 19 nt, Artificial Sequence
  Synthetic
gauuaucugugaugguaaa

SEQ ID NO: 2089 - RNA, 19 nt, Artificial Sequence
  Synthetic
ggaccugaagauaaagaaa

SEQ ID NO: 2090 - RNA, 19 nt, Artificial Sequence
  Synthetic
caucaauccuaacuagaaa

SEQ ID NO: 2091 - RNA, 19 nt, Artificial Sequence
  Synthetic
gguaggaaaucauuaggua

SEQ ID NO: 2092 - RNA, 19 nt, Artificial Sequence
  Synthetic
cacaaaggcuacaagcaua

SEQ ID NO: 2093 - RNA, 19 nt, Artificial Sequence
  Synthetic
ugaagaaagccauggcauu

SEQ ID NO: 2094 - RNA, 19 nt, Artificial Sequence
  Synthetic
acucaagauguuagggcua

SEQ ID NO: 2095 - RNA, 19 nt, Artificial Sequence
  Synthetic
gauuggugguuaugaguuu

SEQ ID NO: 2096 - RNA, 19 nt, Artificial Sequence
  Synthetic
acaagaagaugaugaugau

SEQ ID NO: 2097 - RNA, 19 nt, Artificial Sequence
  Synthetic
cuaacaugccucauaauaa

SEQ ID NO: 2098 - RNA, 19 nt, Artificial Sequence
  Synthetic
auguuagggcuaugggaaa

SEQ ID NO: 2099 - RNA, 19 nt, Artificial Sequence
  Synthetic
ccacaaauacggaccugaa

SEQ ID NO: 2100 - RNA, 19 nt, Artificial Sequence
  Synthetic
ggaaugaggcaguaccuau

SEQ ID NO: 2101 - RNA, 19 nt, Artificial Sequence
  Synthetic
uauguuaaguggcagaaua

SEQ ID NO: 2102 - RNA, 19 nt, Artificial Sequence
  Synthetic
gaaauaaucccucuguuua

SEQ ID NO: 2103 - RNA, 19 nt, Artificial Sequence
  Synthetic
agaaauaaucccucuguuu

SEQ ID NO: 2104 - RNA, 19 nt, Artificial Sequence
  Synthetic
ucaaagaagacauuccuaa

SEQ ID NO: 2105 - RNA, 19 nt, Artificial Sequence
  Synthetic
caaauagcauugacacauu

SEQ ID NO: 2106 - RNA, 19 nt, Artificial Sequence
  Synthetic
ugaaauagcucaaccauua

SEQ ID NO: 2107 - RNA, 19 nt, Artificial Sequence
  Synthetic
ggaauaaagaugugagagu

SEQ ID NO: 2108 - RNA, 19 nt, Artificial Sequence
  Synthetic
agauaugcaugcugaaaua

SEQ ID NO: 2109 - RNA, 19 nt, Artificial Sequence
  Synthetic
ggugauaaguguugaaaau

SEQ ID NO: 2110 - RNA, 19 nt, Artificial Sequence
  Synthetic
ggaagaagcgacaccaaua

SEQ ID NO: 2111 - RNA, 19 nt, Artificial Sequence
  Synthetic
ccuuauacacagaguacua

SEQ ID NO: 2112 - RNA, 19 nt, Artificial Sequence
  Synthetic
gggaagacccugaugacau

SEQ ID NO: 2113 - RNA, 19 nt, Artificial Sequence
  Synthetic
guguuaaaccagcagaaua

SEQ ID NO: 2114 - RNA, 19 nt, Artificial Sequence
  Synthetic
uaauagaacuugaccagua

SEQ ID NO: 2115 - RNA, 19 nt, Artificial Sequence
  Synthetic
ugacaagaaguuaggauau

SEQ ID NO: 2116 - RNA, 19 nt, Artificial Sequence
  Synthetic
uguuaaaccagcagaauau

SEQ ID NO: 2117 - RNA, 19 nt, Artificial Sequence
  Synthetic
gaauaaagaugugagagua

SEQ ID NO: 2118 - RNA, 19 nt, Artificial Sequence
  Synthetic
uagauaagauccugcuuua

SEQ ID NO: 2119 - RNA, 19 nt, Artificial Sequence
  Synthetic
aaggcaaaguuguggaaca

SEQ ID NO: 2120 - RNA, 19 nt, Artificial Sequence
  Synthetic
gagaagaagaaggugauaa

SEQ ID NO: 2121 - RNA, 19 nt, Artificial Sequence
  Synthetic
gaggaaagguuaauagaac

SEQ ID NO: 2122 - RNA, 19 nt, Artificial Sequence
  Synthetic
gcauagggauagauaagau

SEQ ID NO: 2123 - RNA, 19 nt, Artificial Sequence
  Synthetic
gcccauaaaucuuggucuu

SEQ ID NO: 2124 - RNA, 19 nt, Artificial Sequence
  Synthetic
ggaaagguuaauagaacuu

SEQ ID NO: 2125 - RNA, 19 nt, Artificial Sequence
  Synthetic
caacuuugcacuauguaaa

SEQ ID NO: 2126 - RNA, 19 nt, Artificial Sequence
  Synthetic
ggcacauuuuacagaauaa

SEQ ID NO: 2127 - RNA, 19 nt, Artificial Sequence
  Synthetic
gguccugccuucagaaaga

SEQ ID NO: 2128 - RNA, 19 nt, Artificial Sequence
  Synthetic
cgauaaugcguuagcagau

SEQ ID NO: 2129 - RNA, 19 nt, Artificial Sequence
  Synthetic
cgguuacgauaaugcguua

SEQ ID NO: 2130 - RNA, 19 nt, Artificial Sequence
  Synthetic
ccagaaagguggcauuaca

SEQ ID NO: 2131 - RNA, 19 nt, Artificial Sequence
  Synthetic
gccaugaacuccacagauu

SEQ ID NO: 2132 - RNA, 19 nt, Artificial Sequence
  Synthetic
acacugaacugaucaagua

SEQ ID NO: 2133 - RNA, 19 nt, Artificial Sequence
  Synthetic
agaagaaggugauaagugu

SEQ ID NO: 2134 - RNA, 19 nt, Artificial Sequence
  Synthetic
ugaagauagaguugccaaa

SEQ ID NO: 2135 - RNA, 19 nt, Artificial Sequence
  Synthetic
cagcagaauaugaccaaga

SEQ ID NO: 2136 - RNA, 19 nt, Artificial Sequence
  Synthetic
ggaaacacucugagauaua

SEQ ID NO: 2137 - RNA, 19 nt, Artificial Sequence
  Synthetic
ugggaaacacucugagaua

SEQ ID NO: 2138 - RNA, 19 nt, Artificial Sequence
  Synthetic
acaaagugauugagcugaa

SEQ ID NO: 2139 - RNA, 19 nt, Artificial Sequence
  Synthetic
ccauauaccaugagcgcau

SEQ ID NO: 2140 - RNA, 19 nt, Artificial Sequence
  Synthetic
caacaaguccuuugacauu

SEQ ID NO: 2141 - RNA, 19 nt, Artificial Sequence
  Synthetic
ccucaaggcuguagacacu

SEQ ID NO: 2142 - RNA, 19 nt, Artificial Sequence
  Synthetic
acaacgagcucauggacau

SEQ ID NO: 2143 - RNA, 19 nt, Artificial Sequence
  Synthetic
ggauaucaauuuugccaau

SEQ ID NO: 2144 - RNA, 19 nt, Artificial Sequence
  Synthetic
ccuacugccuagaauauaa

SEQ ID NO: 2145 - RNA, 19 nt, Artificial Sequence
  Synthetic
gcauugacguggaaggcca

SEQ ID NO: 2146 - RNA, 19 nt, Artificial Sequence
  Synthetic
ggacaaagugauugagcug

SEQ ID NO: 2147 - RNA, 19 nt, Artificial Sequence
  Synthetic
gaaguuaaauugaggcuua

SEQ ID NO: 2148 - RNA, 19 nt, Artificial Sequence
  Synthetic
gccaaagaaucuaggaaau

SEQ ID NO: 2149 - RNA, 19 nt, Artificial Sequence
  Synthetic
caagaaggauacaagguaa

SEQ ID NO: 2150 - RNA, 19 nt, Artificial Sequence
  Synthetic
ccacaaacacauauugaua

SEQ ID NO: 2151 - RNA, 19 nt, Artificial Sequence
  Synthetic
ccaaauaucuggcugggua

SEQ ID NO: 2152 - RNA, 19 nt, Artificial Sequence
  Synthetic
ccaucaaacugaagcauga

SEQ ID NO: 2153 - RNA, 19 nt, Artificial Sequence
  Synthetic
ggaaauacagagaugaaca

SEQ ID NO: 2154 - RNA, 19 nt, Artificial Sequence
  Synthetic
agaagaaagagaaguguuu

SEQ ID NO: 2155 - RNA, 19 nt, Artificial Sequence
  Synthetic
gucauaauguguugugaaa

SEQ ID NO: 2156 - RNA, 19 nt, Artificial Sequence
  Synthetic
caaaaucaguuuaggacua

SEQ ID NO: 2157 - RNA, 19 nt, Artificial Sequence
  Synthetic
ggacacauuuccacuauaa

SEQ ID NO: 2158 - RNA, 19 nt, Artificial Sequence
  Synthetic
gaaauacagagaugaacaa

SEQ ID NO: 2159 - RNA, 19 nt, Artificial Sequence
  Synthetic
gauucuaccugaacugaaa

SEQ ID NO: 2160 - RNA, 19 nt, Artificial Sequence
  Synthetic
caauaugccugcaggaguu

SEQ ID NO: 2161 - RNA, 19 nt, Artificial Sequence
  Synthetic
ccaacaacccuguguaaca

SEQ ID NO: 2162 - RNA, 19 nt, Artificial Sequence
  Synthetic
ugaggaaggugcaguauuu

SEQ ID NO: 2163 - RNA, 19 nt, Artificial Sequence
  Synthetic
ccaaagaaucuaggaaauu

SEQ ID NO: 2164 - RNA, 19 nt, Artificial Sequence
  Synthetic
gauuggaccaugaaugaua

SEQ ID NO: 2165 - RNA, 19 nt, Artificial Sequence
  Synthetic
caagaaagcuguggcucaa

SEQ ID NO: 2166 - RNA, 19 nt, Artificial Sequence
  Synthetic
cacaauauccaaugaagaa

SEQ ID NO: 2167 - RNA, 19 nt, Artificial Sequence
  Synthetic
agacgaggccuuugcuuua

SEQ ID NO: 2168 - RNA, 19 nt, Artificial Sequence
  Synthetic
ucuaagaaauccagcuuca

SEQ ID NO: 2169 - RNA, 19 nt, Artificial Sequence
  Synthetic
caucaugaccguugcugua

SEQ ID NO: 2170 - RNA, 19 nt, Artificial Sequence
  Synthetic
auacagagaugaacaacuu

SEQ ID NO: 2171 - RNA, 19 nt, Artificial Sequence
  Synthetic
ugugcaaggugauauauaa

SEQ ID NO: 2172 - RNA, 19 nt, Artificial Sequence
  Synthetic
ggucagaaggguuaacuca

SEQ ID NO: 2173 - RNA, 19 nt, Artificial Sequence
  Synthetic
gggauauuguacagaauuc

SEQ ID NO: 2174 - RNA, 19 nt, Artificial Sequence
  Synthetic
acaagaaggauacaaggua

SEQ ID NO: 2175 - RNA, 19 nt, Artificial Sequence
  Synthetic
ugggaugacuuucgauuau

SEQ ID NO: 2176 - RNA, 19 nt, Artificial Sequence
  Synthetic
caguuaggcuuguacauca

SEQ ID NO: 2177 - RNA, 19 nt, Artificial Sequence
  Synthetic
cgaaguaguugaagagcua

SEQ ID NO: 2178 - RNA, 19 nt, Artificial Sequence
  Synthetic
gcgcaaagcuguuaccaaa

SEQ ID NO: 2179 - RNA, 19 nt, Artificial Sequence
  Synthetic
ggacaaacugugugaauau

SEQ ID NO: 2180 - RNA, 19 nt, Artificial Sequence
  Synthetic
agacaaucauguacagaaa

SEQ ID NO: 2181 - RNA, 19 nt, Artificial Sequence
  Synthetic
gaaaauaagccaugagaau

SEQ ID NO: 2182 - RNA, 19 nt, Artificial Sequence
  Synthetic
ccaaugagcagcagugaaa

SEQ ID NO: 2183 - RNA, 19 nt, Artificial Sequence
  Synthetic
aggagaugguguagaagaa

SEQ ID NO: 2184 - RNA, 19 nt, Artificial Sequence
  Synthetic
gcaacaagcuacagccuau

SEQ ID NO: 2185 - RNA, 19 nt, Artificial Sequence
  Synthetic
ggaaauaauucacucacaa

SEQ ID NO: 2186 - RNA, 19 nt, Artificial Sequence
  Synthetic
gaaauuacccuuaggauga

SEQ ID NO: 2187 - RNA, 19 nt, Artificial Sequence
  Synthetic
ccacaaagaauauagauga

SEQ ID NO: 2188 - RNA, 19 nt, Artificial Sequence
  Synthetic
gaauaccaguggaggaauu

SEQ ID NO: 2189 - RNA, 19 nt, Artificial Sequence
  Synthetic
gguccuacgccaacagaua

SEQ ID NO: 2190 - RNA, 19 nt, Artificial Sequence
  Synthetic
ugaagagacaauagcauua

SEQ ID NO: 2191 - RNA, 19 nt, Artificial Sequence
  Synthetic
ccauaagaguuucuccaaa

SEQ ID NO: 2192 - RNA, 19 nt, Artificial Sequence
  Synthetic
cggacaaacugugugaaua

SEQ ID NO: 2193 - RNA, 19 nt, Artificial Sequence
  Synthetic
ggacaggaccuaagcacau

SEQ ID NO: 2194 - RNA, 19 nt, Artificial Sequence
  Synthetic
gggacuuggaugagacaau

SEQ ID NO: 2195 - RNA, 19 nt, Artificial Sequence
  Synthetic
ugucagaccauaagaguuu

SEQ ID NO: 2196 - RNA, 19 nt, Artificial Sequence
  Synthetic
aaagaaagcuguuuugaga

SEQ ID NO: 2197 - RNA, 19 nt, Artificial Sequence
  Synthetic
agaaagcuguuuugagaga

SEQ ID NO: 2198 - RNA, 19 nt, Artificial Sequence
  Synthetic
caucaagacugaaggugga

SEQ ID NO: 2199 - RNA, 19 nt, Artificial Sequence
  Synthetic
gaagcaaacaguugacaau

SEQ ID NO: 2200 - RNA, 19 nt, Artificial Sequence
  Synthetic
uguuauaggagauggugua

SEQ ID NO: 2201 - RNA, 19 nt, Artificial Sequence
  Synthetic
gggcaggcaucaagacuga

SEQ ID NO: 2202 - RNA, 19 nt, Artificial Sequence
  Synthetic
agaagaacaaggagcaaaa

SEQ ID NO: 2203 - RNA, 19 nt, Artificial Sequence
  Synthetic
agacaggauuucucagcua

SEQ ID NO: 2204 - RNA, 19 nt, Artificial Sequence
  Synthetic
uauaggagaugguguagaa

SEQ ID NO: 2205 - RNA, 19 nt, Artificial Sequence
  Synthetic
ugguguagaagaagaacaa

SEQ ID NO: 2206 - RNA, 19 nt, Artificial Sequence
  Synthetic
gcauggaugucaaguguca

SEQ ID NO: 2207 - RNA, 19 nt, Artificial Sequence
  Synthetic
cgucagagguuauaagcaa

SEQ ID NO: 2208 - RNA, 19 nt, Artificial Sequence
  Synthetic
ugacaauggccaagauuua

SEQ ID NO: 2209 - RNA, 19 nt, Artificial Sequence
  Synthetic
aggaugagguacaaggaaa

SEQ ID NO: 2210 - RNA, 19 nt, Artificial Sequence
  Synthetic
ggaaucagauauuggacaa

SEQ ID NO: 2211 - RNA, 19 nt, Artificial Sequence
  Synthetic
ggacagugcacgugccuua

SEQ ID NO: 2212 - RNA, 19 nt, Artificial Sequence
  Synthetic
gaaagcugcaggagggaaa

SEQ ID NO: 2213 - RNA, 19 nt, Artificial Sequence
  Synthetic
gagaacaucuacagugcaa

SEQ ID NO: 2214 - RNA, 19 nt, Artificial Sequence
  Synthetic
cgaaagagggagacacaga

SEQ ID NO: 2215 - RNA, 19 nt, Artificial Sequence
  Synthetic
gugaaggagauguacaaua

SEQ ID NO: 2216 - RNA, 19 nt, Artificial Sequence
  Synthetic
uggccaaaguccugcuaua

SEQ ID NO: 2217 - RNA, 19 nt, Artificial Sequence
  Synthetic
gggugaaggagauguacaa

SEQ ID NO: 2218 - RNA, 19 nt, Artificial Sequence
  Synthetic
guucacaguucuaauguaa

SEQ ID NO: 2219 - RNA, 19 nt, Artificial Sequence
  Synthetic
gugucuaccuggaaugaaa

SEQ ID NO: 2220 - RNA, 19 nt, Artificial Sequence
  Synthetic
ccucaaaccacaauaggaa

SEQ ID NO: 2221 - RNA, 19 nt, Artificial Sequence
  Synthetic
gaggaaauggacugggcaa

SEQ ID NO: 2222 - RNA, 19 nt, Artificial Sequence
  Synthetic
ggacauuugcauccagaua

SEQ ID NO: 2223 - RNA, 19 nt, Artificial Sequence
  Synthetic
caacauuggcuucggagua

SEQ ID NO: 2224 - RNA, 19 nt, Artificial Sequence
  Synthetic
gguacaaggaaaugguaga

SEQ ID NO: 2225 - RNA, 19 nt, Artificial Sequence
  Synthetic
caaggaaaugguagaacua

SEQ ID NO: 2226 - RNA, 19 nt, Artificial Sequence
  Synthetic
agaauaagcuggucuccaa

SEQ ID NO: 2227 - RNA, 19 nt, Artificial Sequence
  Synthetic
agaggauaaugcagagauu

SEQ ID NO: 2228 - RNA, 19 nt, Artificial Sequence
  Synthetic
cagcacaagccuauggaau

SEQ ID NO: 2229 - RNA, 19 nt, Artificial Sequence
  Synthetic
gaucggugaugguguggaa

SEQ ID NO: 2230 - RNA, 19 nt, Artificial Sequence
  Synthetic
ggugcuuugugauggauaa

SEQ ID NO: 2231 - RNA, 19 nt, Artificial Sequence
  Synthetic
gaagacagcuugaaccauu

SEQ ID NO: 2232 - RNA, 19 nt, Artificial Sequence
  Synthetic
gaaugaaacgaaugguaca

SEQ ID NO: 2233 - RNA, 19 nt, Artificial Sequence
  Synthetic
ggagugugcaccaggacua

SEQ ID NO: 2234 - RNA, 19 nt, Artificial Sequence
  Synthetic
acgcagaccuggaggcacu

SEQ ID NO: 2235 - RNA, 19 nt, Artificial Sequence
  Synthetic
ggccaagauuuaagcacau

SEQ ID NO: 2236 - RNA, 19 nt, Artificial Sequence
  Synthetic
ggaagaagagcaagauuua

SEQ ID NO: 2237 - RNA, 19 nt, Artificial Sequence
  Synthetic
cagaaagaauugugugaau

SEQ ID NO: 2238 - RNA, 19 nt, Artificial Sequence
  Synthetic
gagcagaaauugaaguuuu

SEQ ID NO: 2239 - RNA, 19 nt, Artificial Sequence
  Synthetic
gagauuaagagcagaaauu

SEQ ID NO: 2240 - RNA, 19 nt, Artificial Sequence
  Synthetic
ugaagaaauugcagccaaa

SEQ ID NO: 2241 - RNA, 19 nt, Artificial Sequence
  Synthetic
gauccuaugcccagaaaua

SEQ ID NO: 2242 - RNA, 19 nt, Artificial Sequence
  Synthetic
gcaggaaucaggagagcaa

SEQ ID NO: 2243 - RNA, 19 nt, Artificial Sequence
  Synthetic
ucaaugacuuagagacaua

SEQ ID NO: 2244 - RNA, 19 nt, Artificial Sequence
  Synthetic
gagaacaucuauagugcua

SEQ ID NO: 2245 - RNA, 19 nt, Artificial Sequence
  Synthetic
ccacauaccagucggagaa

SEQ ID NO: 2246 - RNA, 19 nt, Artificial Sequence
  Synthetic
aggaagcacugcagagauu

SEQ ID NO: 2247 - RNA, 19 nt, Artificial Sequence
  Synthetic
uggacgagaugaagaaauu

SEQ ID NO: 2248 - RNA, 19 nt, Artificial Sequence
  Synthetic
gugaagaauuugaccugaa

SEQ ID NO: 2249 - RNA, 19 nt, Artificial Sequence
  Synthetic
gcagagauuaagagcagaa

SEQ ID NO: 2250 - RNA, 19 nt, Artificial Sequence
  Synthetic
ggaaagugagagaaaucua

SEQ ID NO: 2251 - RNA, 19 nt, Artificial Sequence
  Synthetic
gucaagguuuggaaagaaa

SEQ ID NO: 2252 - RNA, 19 nt, Artificial Sequence
  Synthetic
ucacaaauguauucugcaa

SEQ ID NO: 2253 - RNA, 19 nt, Artificial Sequence
  Synthetic
gcaagauuuaccagagcaa

SEQ ID NO: 2254 - RNA, 19 nt, Artificial Sequence
  Synthetic
auauggacuaggagaaaua

SEQ ID NO: 2255 - RNA, 19 nt, Artificial Sequence
  Synthetic
gauuaagagcagaaauuga

SEQ ID NO: 2256 - RNA, 19 nt, Artificial Sequence
  Synthetic
uggaagaagagcaagauuu

SEQ ID NO: 2257 - RNA, 19 nt, Artificial Sequence
  Synthetic
agagcaaacuauaagucaa

SEQ ID NO: 2258 - RNA, 19 nt, Artificial Sequence
  Synthetic
gaugaucaguccaggaaaa

SEQ ID NO: 2259 - RNA, 19 nt, Artificial Sequence
  Synthetic
agugauuggcucagguuua

SEQ ID NO: 2260 - RNA, 19 nt, Artificial Sequence
  Synthetic
cuauaagucaaguaagcaa

SEQ ID NO: 2261 - RNA, 19 nt, Artificial Sequence
  Synthetic
ucaccaggcuuuagagcuu

SEQ ID NO: 2262 - RNA, 19 nt, Artificial Sequence
  Synthetic
ggacccaacaguagugauu

SEQ ID NO: 2263 - RNA, 19 nt, Artificial Sequence
  Synthetic
ccggaaagugagagaaauc

SEQ ID NO: 2264 - RNA, 19 nt, Artificial Sequence
  Synthetic
cuauauggacuaggagaaa

SEQ ID NO: 2265 - RNA, 19 nt, Artificial Sequence
  Synthetic
gagaauugugucaagguuu

SEQ ID NO: 2266 - RNA, 19 nt, Artificial Sequence
  Synthetic
gggucaaaguccagaggaa

SEQ ID NO: 2267 - RNA, 19 nt, Artificial Sequence
  Synthetic
gagaauauuuacagugcaa

SEQ ID NO: 2268 - RNA, 19 nt, Artificial Sequence
  Synthetic
ggaaagagcugcgggaaaa

SEQ ID NO: 2269 - RNA, 19 nt, Artificial Sequence
  Synthetic
gggcagagauugaaggucu

SEQ ID NO: 2270 - RNA, 19 nt, Artificial Sequence
  Synthetic
gagagaaccuguaggaguu

SEQ ID NO: 2271 - RNA, 19 nt, Artificial Sequence
  Synthetic
gcacuuaagucuuuaucaa

SEQ ID NO: 2272 - RNA, 19 nt, Artificial Sequence
  Synthetic
gcguauaugacaucgaaua

SEQ ID NO: 2273 - RNA, 19 nt, Artificial Sequence
  Synthetic
agacagcauuuguguguua

SEQ ID NO: 2274 - RNA, 19 nt, Artificial Sequence
  Synthetic
gcauaaaugucuugguaac

SEQ ID NO: 2275 - RNA, 19 nt, Artificial Sequence
  Synthetic
gggaaaugggaauauaaua

SEQ ID NO: 2276 - RNA, 19 nt, Artificial Sequence
  Synthetic
ucucagaauuccaggucua

SEQ ID NO: 2277 - RNA, 19 nt, Artificial Sequence
  Synthetic
ggucuuaugcacagaagua

SEQ ID NO: 2278 - RNA, 19 nt, Artificial Sequence
  Synthetic
cguauaugacaucgaauaa

SEQ ID NO: 2279 - RNA, 19 nt, Artificial Sequence
  Synthetic
gggcaggacuuagguguaa

SEQ ID NO: 2280 - RNA, 19 nt, Artificial Sequence
  Synthetic
aguuaagggcagagauuga

SEQ ID NO: 2281 - RNA, 19 nt, Artificial Sequence
  Synthetic
caaagaucuugaugagaga

SEQ ID NO: 2282 - RNA, 19 nt, Artificial Sequence
  Synthetic
ccaccaagcacuggaauua

SEQ ID NO: 2283 - RNA, 19 nt, Artificial Sequence
  Synthetic
ggaaggaacgagaauaaau

SEQ ID NO: 2284 - RNA, 19 nt, Artificial Sequence
  Synthetic
gaaggaacgagaauaaaua

SEQ ID NO: 2285 - RNA, 19 nt, Artificial Sequence
  Synthetic
auuauuagcacuaggagua

SEQ ID NO: 2286 - RNA, 19 nt, Artificial Sequence
  Synthetic
gcacaguauuauucagcau

SEQ ID NO: 2287 - RNA, 19 nt, Artificial Sequence
  Synthetic
ggaaguuggcuuuucguua

SEQ ID NO: 2288 - RNA, 19 nt, Artificial Sequence
  Synthetic
cagaggaagaggccggaaa

SEQ ID NO: 2289 - RNA, 19 nt, Artificial Sequence
  Synthetic
cugacagauuccuggcuaa

SEQ ID NO: 2290 - RNA, 19 nt, Artificial Sequence
  Synthetic
cuguaggaguucuggguca

SEQ ID NO: 2291 - RNA, 19 nt, Artificial Sequence
  Synthetic
gcacaucaguuacuacaaa

SEQ ID NO: 2292 - RNA, 19 nt, Artificial Sequence
  Synthetic
gggaugguguagaagaaga

SEQ ID NO: 2293 - RNA, 19 nt, Artificial Sequence
  Synthetic
cuauacagccuuuggccaa

SEQ ID NO: 2294 - RNA, 19 nt, Artificial Sequence
  Synthetic
gcagaaaaguaguguaugu

SEQ ID NO: 2295 - RNA, 19 nt, Artificial Sequence
  Synthetic
aagaaaacgugcacagaau

SEQ ID NO: 2296 - RNA, 19 nt, Artificial Sequence
  Synthetic
ggacaaggaugugaagaua

SEQ ID NO: 2297 - RNA, 19 nt, Artificial Sequence
  Synthetic
acaaggaugugaagauaaa

SEQ ID NO: 2298 - RNA, 19 nt, Artificial Sequence
  Synthetic
gguaaaaucuacagccuua

SEQ ID NO: 2299 - RNA, 19 nt, Artificial Sequence
  Synthetic
guaaauauguggucuguuu

SEQ ID NO: 2300 - RNA, 19 nt, Artificial Sequence
  Synthetic
ccacugguguuaagauaua

SEQ ID NO: 2301 - RNA, 19 nt, Artificial Sequence
  Synthetic
cugaguacauccagaggaa

SEQ ID NO: 2302 - RNA, 19 nt, Artificial Sequence
  Synthetic
ccuagagagcagaaauaaa

SEQ ID NO: 2303 - RNA, 19 nt, Artificial Sequence
  Synthetic
ggaaggaggccguguuaga

SEQ ID NO: 2304 - RNA, 19 nt, Artificial Sequence
  Synthetic
gaguacauccagaggaaga

SEQ ID NO: 2305 - RNA, 19 nt, Artificial Sequence
  Synthetic
uggcaucuauagaaagaaa

SEQ ID NO: 2306 - RNA, 19 nt, Artificial Sequence
  Synthetic
ugucagaagaagauaaaca

SEQ ID NO: 2307 - RNA, 19 nt, Artificial Sequence
  Synthetic
caacgugacaggugaucaa

SEQ ID NO: 2308 - RNA, 19 nt, Artificial Sequence
  Synthetic
uggccuacgucauggagaa

SEQ ID NO: 2309 - RNA, 19 nt, Artificial Sequence
  Synthetic
uugaguggauggaggagaa

SEQ ID NO: 2310 - RNA, 19 nt, Artificial Sequence
  Synthetic
cgucauucccacagacauu

SEQ ID NO: 2311 - RNA, 19 nt, Artificial Sequence
  Synthetic
uggacaaggaugugaagau

SEQ ID NO: 2312 - RNA, 19 nt, Artificial Sequence
  Synthetic
ccaacgaccugguuaugaa

SEQ ID NO: 2313 - RNA, 19 nt, Artificial Sequence
  Synthetic
gacaaggaugugaagauaa

SEQ ID NO: 2314 - RNA, 19 nt, Artificial Sequence
  Synthetic
cgugucagaagaagauaaa

SEQ ID NO: 2315 - RNA, 19 nt, Artificial Sequence
  Synthetic
uggaggagaaauaaacuua

SEQ ID NO: 2316 - RNA, 19 nt, Artificial Sequence
  Synthetic
ugacaggugaucaaguuaa

SEQ ID NO: 2317 - RNA, 19 nt, Artificial Sequence
  Synthetic
gcacagcagucaaagccau

SEQ ID NO: 2318 - RNA, 19 nt, Artificial Sequence
  Synthetic
caucaaaugcuguagaaug

SEQ ID NO: 2319 - RNA, 19 nt, Artificial Sequence
  Synthetic
ugagaaggaugcucugcaa

SEQ ID NO: 2320 - RNA, 19 nt, Artificial Sequence
  Synthetic
ugccacugguguuaagaua

SEQ ID NO: 2321 - RNA, 19 nt, Artificial Sequence
  Synthetic
cuagagagcagaaauaaaa

SEQ ID NO: 2322 - RNA, 19 nt, Artificial Sequence
  Synthetic
uccugaagguguaugagaa

SEQ ID NO: 2323 - RNA, 19 nt, Artificial Sequence
  Synthetic
agauaaacacgccaucaua

SEQ ID NO: 2324 - RNA, 19 nt, Artificial Sequence
  Synthetic
ucgaguuccugaaggugua

SEQ ID NO: 2325 - RNA, 19 nt, Artificial Sequence
  Synthetic
cauaaugccacugguguua

SEQ ID NO: 2326 - RNA, 19 nt, Artificial Sequence
  Synthetic
gugaaggacuagaaauaaa

SEQ ID NO: 2327 - RNA, 19 nt, Artificial Sequence
  Synthetic
cagaggaugugcaggaaua

SEQ ID NO: 2328 - RNA, 19 nt, Artificial Sequence
  Synthetic
ggaaauacguggucugcuu

SEQ ID NO: 2329 - RNA, 19 nt, Artificial Sequence
  Synthetic
gagaugaggugaagaaacu

SEQ ID NO: 2330 - RNA, 19 nt, Artificial Sequence
  Synthetic
aaacagagaugguagcuau

SEQ ID NO: 2331 - RNA, 19 nt, Artificial Sequence
  Synthetic
cgggagaugaggugaagaa

SEQ ID NO: 2332 - RNA, 19 nt, Artificial Sequence
  Synthetic
ggaaagauuuacagccuga

SEQ ID NO: 2333 - RNA, 19 nt, Artificial Sequence
  Synthetic
acgugaagcccgaggcaau

SEQ ID NO: 2334 - RNA, 19 nt, Artificial Sequence
  Synthetic
ccacugaauaugugcagaa

SEQ ID NO: 2335 - RNA, 19 nt, Artificial Sequence
  Synthetic
uggucaaugugaaggacua

SEQ ID NO: 2336 - RNA, 19 nt, Artificial Sequence
  Synthetic
ccuaaaugaacgauaaaca

SEQ ID NO: 2337 - RNA, 19 nt, Artificial Sequence
  Synthetic
gcguuaacgugacgggaga

SEQ ID NO: 2338 - RNA, 19 nt, Artificial Sequence
  Synthetic
gaagaaacuggaugugcua

SEQ ID NO: 2339 - RNA, 19 nt, Artificial Sequence
  Synthetic
gacccuaaaugaacgauaa

SEQ ID NO: 2340 - RNA, 19 nt, Artificial Sequence
  Synthetic
gagaaaaggauuugaagca

SEQ ID NO: 2341 - RNA, 19 nt, Artificial Sequence
  Synthetic
gaggaugagccuucugaaa

SEQ ID NO: 2342 - RNA, 19 nt, Artificial Sequence
  Synthetic
ccaauucccuggugaucaa

SEQ ID NO: 2343 - RNA, 19 nt, Artificial Sequence
  Synthetic
gaaaaggauuugaagcauu

SEQ ID NO: 2344 - RNA, 19 nt, Artificial Sequence
  Synthetic
gcaggcagcuagcgaguuu

SEQ ID NO: 2345 - RNA, 19 nt, Artificial Sequence
  Synthetic
gguuaugcgcuguacggua

SEQ ID NO: 2346 - RNA, 19 nt, Artificial Sequence
  Synthetic
ugacgggagaugaggugaa

SEQ ID NO: 2347 - RNA, 19 nt, Artificial Sequence
  Synthetic
gcgcuguacgguagugcaa

SEQ ID NO: 2348 - RNA, 19 nt, Artificial Sequence
  Synthetic
aaagaaauucccugaggau

SEQ ID NO: 2349 - RNA, 19 nt, Artificial Sequence
  Synthetic
acagaagagcaacaacaaa

SEQ ID NO: 2350 - RNA, 19 nt, Artificial Sequence
  Synthetic
ggacccuaaaugaacgaua

SEQ ID NO: 2351 - RNA, 19 nt, Artificial Sequence
  Synthetic
gcaggaagcguuaacguga

SEQ ID NO: 2352 - RNA, 19 nt, Artificial Sequence
  Synthetic
ucuaaggacccuaaaugaa

SEQ ID NO: 2353 - RNA, 19 nt, Artificial Sequence
  Synthetic
agguaaauccacuuaauca

SEQ ID NO: 2354 - RNA, 19 nt, Artificial Sequence
  Synthetic
auacagaagagcaacaaca

SEQ ID NO: 2355 - RNA, 19 nt, Artificial Sequence
  Synthetic
acucaaugcugacggccau

SEQ ID NO: 2356 - RNA, 19 nt, Artificial Sequence
  Synthetic
gcucaggaaagaagagaaa

SEQ ID NO: 2357 - RNA, 19 nt, Artificial Sequence
  Synthetic
agaaagagaaagaagguau

SEQ ID NO: 2358 - RNA, 19 nt, Artificial Sequence
  Synthetic
caggaaggcuggagacuuu

SEQ ID NO: 2359 - RNA, 19 nt, Artificial Sequence
  Synthetic
gaagggagagaaagagaaa

SEQ ID NO: 2360 - RNA, 19 nt, Artificial Sequence
  Synthetic
ggagaucagaggaggaaau

SEQ ID NO: 2361 - RNA, 19 nt, Artificial Sequence
  Synthetic
agaagguauccuaggaaua

SEQ ID NO: 2362 - RNA, 19 nt, Artificial Sequence
  Synthetic
gguggaagggagagaaaga

SEQ ID NO: 2363 - RNA, 19 nt, Artificial Sequence
  Synthetic
augaggagcuccagaaaca

SEQ ID NO: 2364 - RNA, 19 nt, Artificial Sequence
  Synthetic
guaaagguccguagugcua

SEQ ID NO: 2365 - RNA, 19 nt, Artificial Sequence
  Synthetic
gaagagaaauccacugaga

SEQ ID NO: 2366 - RNA, 19 nt, Artificial Sequence
  Synthetic
aggaauaccugccugcuua

SEQ ID NO: 2367 - RNA, 19 nt, Artificial Sequence
  Synthetic
ggaggaaauggcagcagaa

SEQ ID NO: 2368 - RNA, 19 nt, Artificial Sequence
  Synthetic
ggaagggagagaaagagaa

SEQ ID NO: 2369 - RNA, 19 nt, Artificial Sequence
  Synthetic
cccaagaggaacugaauca

SEQ ID NO: 2370 - RNA, 19 nt, Artificial Sequence
  Synthetic
gaauaggaaaccuguggua

SEQ ID NO: 2371 - RNA, 19 nt, Artificial Sequence
  Synthetic
agguagcagucuucugaaa

SEQ ID NO: 2372 - RNA, 19 nt, Artificial Sequence
  Synthetic
agagaaagaagguauccua

SEQ ID NO: 2373 - RNA, 19 nt, Artificial Sequence
  Synthetic
cugaugaaguggccgauuu

SEQ ID NO: 2374 - RNA, 19 nt, Artificial Sequence
  Synthetic
cuggagacuuucacaggaa

SEQ ID NO: 2375 - RNA, 19 nt, Artificial Sequence
  Synthetic
ggagagaaagagaaagaag

SEQ ID NO: 2376 - RNA, 19 nt, Artificial Sequence
  Synthetic
aagaagguauccuaggaau

SEQ ID NO: 2377 - RNA, 19 nt, Artificial Sequence
  Synthetic
agagaaauccacugagaac

SEQ ID NO: 2378 - RNA, 19 nt, Artificial Sequence
  Synthetic
gagaaagagaaagaaggua

SEQ ID NO: 2379 - RNA, 19 nt, Artificial Sequence
  Synthetic
gaaagaagguauccuagga

SEQ ID NO: 2380 - RNA, 19 nt, Artificial Sequence
  Synthetic
ggacaugucguucagauuu

SEQ ID NO: 2381 - RNA, 19 nt, Artificial Sequence
  Synthetic
ucggcagccuuaugauuaa

SEQ ID NO: 2382 - RNA, 19 nt, Artificial Sequence
  Synthetic
ugaccugcguccugaugaa

SEQ ID NO: 2383 - RNA, 19 nt, Artificial Sequence
  Synthetic
guucagauuuggccaacau

SEQ ID NO: 2384 - RNA, 19 nt, Artificial Sequence
  Synthetic
ccacugaggacuccgaaga

SEQ ID NO: 2385 - RNA, 19 nt, Artificial Sequence
  Synthetic
gauccugaauuccagcaaa

SEQ ID NO: 2386 - RNA, 19 nt, Artificial Sequence
  Synthetic
cagaguggauggaggagaa

SEQ ID NO: 2387 - RNA, 19 nt, Artificial Sequence
  Synthetic
cggaagaaccgguacaaaa

SEQ ID NO: 2388 - RNA, 19 nt, Artificial Sequence
  Synthetic
agcaauaaacggagcauuu

SEQ ID NO: 2389 - RNA, 19 nt, Artificial Sequence
  Synthetic
gagccaggagugagagaga

SEQ ID NO: 2390 - RNA, 19 nt, Artificial Sequence
  Synthetic
ucaccaacaucgaggagau

SEQ ID NO: 2391 - RNA, 19 nt, Artificial Sequence
  Synthetic
ccagaauguuuccgugcua

SEQ ID NO: 2392 - RNA, 19 nt, Artificial Sequence
  Synthetic
gggaggagaagguguacau

SEQ ID NO: 2393 - RNA, 19 nt, Artificial Sequence
  Synthetic
ggauggaggagaagaucga

SEQ ID NO: 2394 - RNA, 19 nt, Artificial Sequence
  Synthetic
aggcggaauucuuugaaau

SEQ ID NO: 2395 - RNA, 19 nt, Artificial Sequence
  Synthetic
acaccuugggaaugaauua

SEQ ID NO: 2396 - RNA, 19 nt, Artificial Sequence
  Synthetic
ucauucacacggaggauua

SEQ ID NO: 2397 - RNA, 19 nt, Artificial Sequence
  Synthetic
ucgaggagaugaacgagaa

SEQ ID NO: 2398 - RNA, 19 nt, Artificial Sequence
  Synthetic
gagcgaggccugaagcauu

SEQ ID NO: 2399 - RNA, 19 nt, Artificial Sequence
  Synthetic
cgaggagggcuuuggcuau

SEQ ID NO: 2400 - RNA, 19 nt, Artificial Sequence
  Synthetic
ggagugagagagagaacca

SEQ ID NO: 2401 - RNA, 19 nt, Artificial Sequence
  Synthetic
aagcauuacugguucacau

SEQ ID NO: 2402 - RNA, 19 nt, Artificial Sequence
  Synthetic
gacaugugcugcagugaga

SEQ ID NO: 2403 - RNA, 19 nt, Artificial Sequence
  Synthetic
gaaggucaccagagagcuu

SEQ ID NO: 2404 - RNA, 19 nt, Artificial Sequence
  Synthetic
gaugaagggaaguggacua

SEQ ID NO: 2405 - RNA, 19 nt, Artificial Sequence
  Synthetic
gggaaguggacuaaaguau

SEQ ID NO: 2406 - RNA, 19 nt, Artificial Sequence
  Synthetic
gaaguggacuaaaguauua

SEQ ID NO: 2407 - RNA, 19 nt, Artificial Sequence
  Synthetic
gggcuuggcugcaggagau

SEQ ID NO: 2408 - RNA, 19 nt, Artificial Sequence
  Synthetic
gcaccaugcuggccuguua

SEQ ID NO: 2409 - RNA, 19 nt, Artificial Sequence
  Synthetic
agaccuaugagcaggagaa

SEQ ID NO: 2410 - RNA, 19 nt, Artificial Sequence
  Synthetic
guacugcuuuguugaauaa

SEQ ID NO: 2411 - RNA, 19 nt, Artificial Sequence
  Synthetic
ggaaguggacuaaaguauu

SEQ ID NO: 2412 - RNA, 19 nt, Artificial Sequence
  Synthetic
ggcugaagacacugaagua

SEQ ID NO: 2413 - RNA, 19 nt, Artificial Sequence
  Synthetic
ccuguuaccuggugaagga

SEQ ID NO: 2414 - RNA, 19 nt, Artificial Sequence
  Synthetic
uguacugcuuuguugaaua

SEQ ID NO: 2415 - RNA, 19 nt, Artificial Sequence
  Synthetic
aagcagucuuccaguucua

SEQ ID NO: 2416 - RNA, 19 nt, Artificial Sequence
  Synthetic
aggagaugccauugcugaa

SEQ ID NO: 2417 - RNA, 19 nt, Artificial Sequence
  Synthetic
ccuaugagcaggagaaagc

SEQ ID NO: 2418 - RNA, 19 nt, Artificial Sequence
  Synthetic
gaagggaaguggacuaaag

SEQ ID NO: 2419 - RNA, 19 nt, Artificial Sequence
  Synthetic
ggagaugccauugcugaaa

SEQ ID NO: 2420 - RNA, 19 nt, Artificial Sequence
  Synthetic
ucuaccagcgaacgaaaua

SEQ ID NO: 2421 - RNA, 19 nt, Artificial Sequence
  Synthetic
agaaagcagucuuccaguu

SEQ ID NO: 2422 - RNA, 19 nt, Artificial Sequence
  Synthetic
gagaugccauugcugaaau

SEQ ID NO: 2423 - RNA, 19 nt, Artificial Sequence
  Synthetic
gcugaaauccgacgacuac

SEQ ID NO: 2424 - RNA, 19 nt, Artificial Sequence
  Synthetic
cccauuggcugaagacacu

SEQ ID NO: 2425 - RNA, 19 nt, Artificial Sequence
  Synthetic
cugcuuuguugaauaaaug

SEQ ID NO: 2426 - RNA, 19 nt, Artificial Sequence
  Synthetic
ugaaauccgacgacuacga

SEQ ID NO: 2427 - RNA, 19 nt, Artificial Sequence
  Synthetic
gaaagcagucuuccaguuc

SEQ ID NO: 2428 - RNA, 19 nt, Artificial Sequence
  Synthetic
gcaggagaaagcagucuuc

SEQ ID NO: 2429 - RNA, 19 nt, Artificial Sequence
  Synthetic
caacuucuccugggugcuu

SEQ ID NO: 2430 - RNA, 19 nt, Artificial Sequence
  Synthetic
ggcuuguacugcuuuguug

SEQ ID NO: 2431 - RNA, 19 nt, Artificial Sequence
  Synthetic
ggaggcuuguacugcuuug

SEQ ID NO: 2432 - RNA, 19 nt, Artificial Sequence
  Synthetic
aaagcagucuuccaguucu

SEQ ID NO: 2433 - RNA, 19 nt, Artificial Sequence
  Synthetic
gggaggcuuguacugcuuu

SEQ ID NO: 2434 - RNA, 19 nt, Artificial Sequence
  Synthetic
gaauauaaagaucgggauu

SEQ ID NO: 2435 - RNA, 19 nt, Artificial Sequence
  Synthetic
ccucugagaagguggacaa

SEQ ID NO: 2436 - RNA, 19 nt, Artificial Sequence
  Synthetic
gcagaagggcucauauuua

SEQ ID NO: 2437 - RNA, 19 nt, Artificial Sequence
  Synthetic
cagaagggcucauauuuaa

SEQ ID NO: 2438 - RNA, 19 nt, Artificial Sequence
  Synthetic
ugauaaggucagaggcuau

SEQ ID NO: 2439 - RNA, 19 nt, Artificial Sequence
  Synthetic
agcaaugccuugugaagaa

SEQ ID NO: 2440 - RNA, 19 nt, Artificial Sequence
  Synthetic
guggagaacaagaagguga

SEQ ID NO: 2441 - RNA, 19 nt, Artificial Sequence
  Synthetic
uggacaaagcccagcgcua

SEQ ID NO: 2442 - RNA, 19 nt, Artificial Sequence
  Synthetic
gcaaaggggaggagauuuu

SEQ ID NO: 2443 - RNA, 19 nt, Artificial Sequence
  Synthetic
agaacaagaaggugaaguu

SEQ ID NO: 2444 - RNA, 19 nt, Artificial Sequence
  Synthetic
ccugagugaucgagagacu

SEQ ID NO: 2445 - RNA, 19 nt, Artificial Sequence
  Synthetic
gagaaagacacguuugaga

SEQ ID NO: 2446 - RNA, 19 nt, Artificial Sequence
  Synthetic
cugaagacccagaggagga

SEQ ID NO: 2447 - RNA, 19 nt, Artificial Sequence
  Synthetic
accugaugguggagaacaa

SEQ ID NO: 2448 - RNA, 19 nt, Artificial Sequence
  Synthetic
gggagcugcuggaggaguu

SEQ ID NO: 2449 - RNA, 19 nt, Artificial Sequence
  Synthetic
guauccaggcugugaauuu

SEQ ID NO: 2450 - RNA, 19 nt, Artificial Sequence
  Synthetic
ggacaaagcccagcgcuau

SEQ ID NO: 2451 - RNA, 19 nt, Artificial Sequence
  Synthetic
uggagaacaagaaggugaa

SEQ ID NO: 2452 - RNA, 19 nt, Artificial Sequence
  Synthetic
aaguuuggcaugaauguaa

SEQ ID NO: 2453 - RNA, 19 nt, Artificial Sequence
  Synthetic
agaaugaggcaguuugaca

SEQ ID NO: 2454 - RNA, 19 nt, Artificial Sequence
  Synthetic
caguaucaguguugggauc

SEQ ID NO: 2455 - RNA, 19 nt, Artificial Sequence
  Synthetic
ggacugugcucuucgaagu

SEQ ID NO: 2456 - RNA, 19 nt, Artificial Sequence
  Synthetic
gugaccugaugguggagaa

SEQ ID NO: 2457 - RNA, 19 nt, Artificial Sequence
  Synthetic
gaguaugagaguucugaga

SEQ ID NO: 2458 - RNA, 19 nt, Artificial Sequence
  Synthetic
ugacacagaucacaaaaua

SEQ ID NO: 2459 - RNA, 19 nt, Artificial Sequence
  Synthetic
ggugaaguuuggcaugaau

SEQ ID NO: 2460 - RNA, 19 nt, Artificial Sequence
  Synthetic
cgguuugucugcccaguaa

SEQ ID NO: 2461 - RNA, 19 nt, Artificial Sequence
  Synthetic
ggaagcaggacuacguuga

SEQ ID NO: 2462 - RNA, 19 nt, Artificial Sequence
  Synthetic
gcccaguaauccuguucaa

SEQ ID NO: 2463 - RNA, 19 nt, Artificial Sequence
  Synthetic
agagaugucuggagcuguu

SEQ ID NO: 2464 - RNA, 19 nt, Artificial Sequence
  Synthetic
gcacaagggacaagaggaa

SEQ ID NO: 2465 - RNA, 19 nt, Artificial Sequence
  Synthetic
cuacaaacguguggagaaa

SEQ ID NO: 2466 - RNA, 19 nt, Artificial Sequence
  Synthetic
gauuaucaaugcagagaaa

SEQ ID NO: 2467 - RNA, 19 nt, Artificial Sequence
  Synthetic
gcuacaaacguguggagaa

SEQ ID NO: 2468 - RNA, 19 nt, Artificial Sequence
  Synthetic
agucagagcuggaagugua

SEQ ID NO: 2469 - RNA, 19 nt, Artificial Sequence
  Synthetic
acacaaacauccagcucaa

SEQ ID NO: 2470 - RNA, 19 nt, Artificial Sequence
  Synthetic
gcacacagggaaaggaaga

SEQ ID NO: 2471 - RNA, 19 nt, Artificial Sequence
  Synthetic
gggcagaagacuuggugau

SEQ ID NO: 2472 - RNA, 19 nt, Artificial Sequence
  Synthetic
ggagagugccuuucaggaa

SEQ ID NO: 2473 - RNA, 19 nt, Artificial Sequence
  Synthetic
ggugcggagagaugagaua

SEQ ID NO: 2474 - RNA, 19 nt, Artificial Sequence
  Synthetic
ggacagaagguuuuguuca

SEQ ID NO: 2475 - RNA, 19 nt, Artificial Sequence
  Synthetic
gggcaucccuccaguguga

SEQ ID NO: 2476 - RNA, 19 nt, Artificial Sequence
  Synthetic
acauccaucucaagaggaa

SEQ ID NO: 2477 - RNA, 19 nt, Artificial Sequence
  Synthetic
gcagcaagcccaaguaguu

SEQ ID NO: 2478 - RNA, 19 nt, Artificial Sequence
  Synthetic
gcaucagggcagaagacuu

SEQ ID NO: 2479 - RNA, 19 nt, Artificial Sequence
  Synthetic
cagagugacuuuacaacuu

SEQ ID NO: 2480 - RNA, 19 nt, Artificial Sequence
  Synthetic
gagagugccuuucaggaau

SEQ ID NO: 2481 - RNA, 19 nt, Artificial Sequence
  Synthetic
aggaaugugaugaggugau

SEQ ID NO: 2482 - RNA, 19 nt, Artificial Sequence
  Synthetic
gcuucuggcuggugaguuc

SEQ ID NO: 2483 - RNA, 19 nt, Artificial Sequence
  Synthetic
ggguaggcaggcucgguua

SEQ ID NO: 2484 - RNA, 19 nt, Artificial Sequence
  Synthetic
acaaacguguggagaaauc

SEQ ID NO: 2485 - RNA, 19 nt, Artificial Sequence
  Synthetic
augaguggcuggagcuaca

SEQ ID NO: 2486 - RNA, 19 nt, Artificial Sequence
  Synthetic
caacacacauccaucucaa

SEQ ID NO: 2487 - RNA, 19 nt, Artificial Sequence
  Synthetic
uaucagggcauguguucaa

SEQ ID NO: 2488 - RNA, 19 nt, Artificial Sequence
  Synthetic
agaaaucggaucucaagua

SEQ ID NO: 2489 - RNA, 19 nt, Artificial Sequence
  Synthetic
ggaaagcuguacauggcca

SEQ ID NO: 2490 - RNA, 19 nt, Artificial Sequence
  Synthetic
cucaagaggaacauuuaua

SEQ ID NO: 2491 - RNA, 19 nt, Artificial Sequence
  Synthetic
cucaguuuguggaggaaaa

SEQ ID NO: 2492 - RNA, 19 nt, Artificial Sequence
  Synthetic
ccagagacucggauuauca

SEQ ID NO: 2493 - RNA, 19 nt, Artificial Sequence
  Synthetic
gcagguggcuuguagaaac

SEQ ID NO: 2494 - RNA, 19 nt, Artificial Sequence
  Synthetic
ggaagggacuuaagagaaa

SEQ ID NO: 2495 - RNA, 19 nt, Artificial Sequence
  Synthetic
gauagagaggcaagaguaa

SEQ ID NO: 2496 - RNA, 19 nt, Artificial Sequence
  Synthetic
gaguaaagcuagcaaagga

SEQ ID NO: 2497 - RNA, 19 nt, Artificial Sequence
  Synthetic
gggcuuugauagagaggca

SEQ ID NO: 2498 - RNA, 19 nt, Artificial Sequence
  Synthetic
ggauaggacucaagcgaag

SEQ ID NO: 2499 - RNA, 19 nt, Artificial Sequence
  Synthetic
gggcguggucuuuuggaaa

SEQ ID NO: 2500 - RNA, 19 nt, Artificial Sequence
  Synthetic
agagaaagggcguggucuu

SEQ ID NO: 2501 - RNA, 19 nt, Artificial Sequence
  Synthetic
cagcagagggagagagccu

SEQ ID NO: 2502 - RNA, 19 nt, Artificial Sequence
  Synthetic
uggaagggacuuaagagaa

SEQ ID NO: 2503 - RNA, 19 nt, Artificial Sequence
  Synthetic
ggaggagggcuuugauaga

SEQ ID NO: 2504 - RNA, 19 nt, Artificial Sequence
  Synthetic
gcuggaagguggaagagca

SEQ ID NO: 2505 - RNA, 19 nt, Artificial Sequence
  Synthetic
guggaagggacuuaagaga

SEQ ID NO: 2506 - RNA, 19 nt, Artificial Sequence
  Synthetic
ugauagagaggcaagagua

SEQ ID NO: 2507 - RNA, 19 nt, Artificial Sequence
  Synthetic
caagaguaaagcuagcaaa

SEQ ID NO: 2508 - RNA, 19 nt, Artificial Sequence
  Synthetic
gggauaggacucaagcgaa

SEQ ID NO: 2509 - RNA, 19 nt, Artificial Sequence
  Synthetic
aggagggcuuugauagaga

SEQ ID NO: 2510 - RNA, 19 nt, Artificial Sequence
  Synthetic
aggcugaggacgaguucau

SEQ ID NO: 2511 - RNA, 19 nt, Artificial Sequence
  Synthetic
cgggagaguuaguggaagg

SEQ ID NO: 2512 - RNA, 19 nt, Artificial Sequence
  Synthetic
gcucacugcacuuggcuuu

SEQ ID NO: 2513 - RNA, 19 nt, Artificial Sequence
  Synthetic
gcaagaguaaagcuagcaa

SEQ ID NO: 2514 - RNA, 19 nt, Artificial Sequence
  Synthetic
uugaggcacgggagaguua

SEQ ID NO: 2515 - RNA, 19 nt, Artificial Sequence
  Synthetic
aguuaguggaagggacuua

SEQ ID NO: 2516 - RNA, 19 nt, Artificial Sequence
  Synthetic
ggagagagccucgggguuu

SEQ ID NO: 2517 - RNA, 19 nt, Artificial Sequence
  Synthetic
ggccggaaguauugauuag

SEQ ID NO: 2518 - RNA, 19 nt, Artificial Sequence
  Synthetic
gggaggagggcuuugauag

SEQ ID NO: 2519 - RNA, 19 nt, Artificial Sequence
  Synthetic
uagagaggcaagaguaaag

SEQ ID NO: 2520 - RNA, 19 nt, Artificial Sequence
  Synthetic
gagagagccucgggguuuu

SEQ ID NO: 2521 - RNA, 19 nt, Artificial Sequence
  Synthetic
gcacuuggcuuucguuacc

SEQ ID NO: 2522 - RNA, 19 nt, Artificial Sequence
  Synthetic
gaagguggaagagcaggua

SEQ ID NO: 2523 - RNA, 19 nt, Artificial Sequence
  Synthetic
ccggaaguauugauuagug

SEQ ID NO: 2524 - RNA, 19 nt, Artificial Sequence
  Synthetic
gaacagagaucguggauua

SEQ ID NO: 2525 - RNA, 19 nt, Artificial Sequence
  Synthetic
ggaaauaaagcuacaucua

SEQ ID NO: 2526 - RNA, 19 nt, Artificial Sequence
  Synthetic
ccaaagcaaucguggaaga

SEQ ID NO: 2527 - RNA, 19 nt, Artificial Sequence
  Synthetic
ugauugugcuggagaagaa

SEQ ID NO: 2528 - RNA, 19 nt, Artificial Sequence
  Synthetic
aagcaaucguggaagauga

SEQ ID NO: 2529 - RNA, 19 nt, Artificial Sequence
  Synthetic
agaaacagaucauccuaaa

SEQ ID NO: 2530 - RNA, 19 nt, Artificial Sequence
  Synthetic
gagaauguuuggacucuaa

SEQ ID NO: 2531 - RNA, 19 nt, Artificial Sequence
  Synthetic
ucacaaagauggaaaagau

SEQ ID NO: 2532 - RNA, 19 nt, Artificial Sequence
  Synthetic
acacugaccuggaacagaa

SEQ ID NO: 2533 - RNA, 19 nt, Artificial Sequence
  Synthetic
ccugagaccacuuguaaau

SEQ ID NO: 2534 - RNA, 19 nt, Artificial Sequence
  Synthetic
gaugauguccacugagcaa

SEQ ID NO: 2535 - RNA, 19 nt, Artificial Sequence
  Synthetic
aaaggauggugacaagaua

SEQ ID NO: 2536 - RNA, 19 nt, Artificial Sequence
  Synthetic
ggagagaggugagaacuau

SEQ ID NO: 2537 - RNA, 19 nt, Artificial Sequence
  Synthetic
acaagugagucauuaucaa

SEQ ID NO: 2538 - RNA, 19 nt, Artificial Sequence
  Synthetic
gauggugacaagauagcua

SEQ ID NO: 2539 - RNA, 19 nt, Artificial Sequence
  Synthetic
ccagauacucuaaauguga

SEQ ID NO: 2540 - RNA, 19 nt, Artificial Sequence
  Synthetic
ccuaaggaagagagagaaa

SEQ ID NO: 2541 - RNA, 19 nt, Artificial Sequence
  Synthetic
uguggaagcugaagaaaua

SEQ ID NO: 2542 - RNA, 19 nt, Artificial Sequence
  Synthetic
gaaaguugguuuauggaua

SEQ ID NO: 2543 - RNA, 19 nt, Artificial Sequence
  Synthetic
aaacagauaucucgaguaa

SEQ ID NO: 2544 - RNA, 19 nt, Artificial Sequence
  Synthetic
ggaaauauucagagguuga

SEQ ID NO: 2545 - RNA, 19 nt, Artificial Sequence
  Synthetic
agaagaagcagaagaaaca

SEQ ID NO: 2546 - RNA, 19 nt, Artificial Sequence
  Synthetic
caacaggaauggccaguaa

SEQ ID NO: 2547 - RNA, 19 nt, Artificial Sequence
  Synthetic
acagauaucucgaguaaga

SEQ ID NO: 2548 - RNA, 19 nt, Artificial Sequence
  Synthetic
gaggaaauauucagagguu

SEQ ID NO: 2549 - RNA, 19 nt, Artificial Sequence
  Synthetic
gcguauaucucaaauggua

SEQ ID NO: 2550 - RNA, 19 nt, Artificial Sequence
  Synthetic
gcuagaagaugcagcacuu

SEQ ID NO: 2551 - RNA, 19 nt, Artificial Sequence
  Synthetic
ggaugaaacacuagugcau

SEQ ID NO: 2552 - RNA, 19 nt, Artificial Sequence
  Synthetic
gagacuggguagauaagaa

SEQ ID NO: 2553 - RNA, 19 nt, Artificial Sequence
  Synthetic
ugacagaagaacaacuaaa

SEQ ID NO: 2554 - RNA, 19 nt, Artificial Sequence
  Synthetic
cagacaaguuacugaacau

SEQ ID NO: 2555 - RNA, 19 nt, Artificial Sequence
  Synthetic
gcacagugacucaguauuu

SEQ ID NO: 2556 - RNA, 19 nt, Artificial Sequence
  Synthetic
gggaaagacaccacacauu

SEQ ID NO: 2557 - RNA, 19 nt, Artificial Sequence
  Synthetic
uaacaguagcuaugcauaa

SEQ ID NO: 2558 - RNA, 19 nt, Artificial Sequence
  Synthetic
cacaagagguugauauuuu

SEQ ID NO: 2559 - RNA, 19 nt, Artificial Sequence
  Synthetic
caccuaaggaagagagaga

SEQ ID NO: 2560 - RNA, 19 nt, Artificial Sequence
  Synthetic
cuaagaagguguaugcaga

SEQ ID NO: 2561 - RNA, 19 nt, Artificial Sequence
  Synthetic
ccuauagaaaguugguuua

SEQ ID NO: 2562 - RNA, 19 nt, Artificial Sequence
  Synthetic
ggagaagcuugguaguuau

SEQ ID NO: 2563 - RNA, 19 nt, Artificial Sequence
  Synthetic
caagagacuggguagauaa

SEQ ID NO: 2564 - RNA, 19 nt, Artificial Sequence
  Synthetic
gaaaguacaguauuggaaa

SEQ ID NO: 2565 - RNA, 19 nt, Artificial Sequence
  Synthetic
uguaaaggaugucaaagaa

SEQ ID NO: 2566 - RNA, 19 nt, Artificial Sequence
  Synthetic
gcaauggcacacagauuua

SEQ ID NO: 2567 - RNA, 19 nt, Artificial Sequence
  Synthetic
uggagaagcuugguaguua

SEQ ID NO: 2568 - RNA, 19 nt, Artificial Sequence
  Synthetic
cuaggcaacuccagugaaa

SEQ ID NO: 2569 - RNA, 19 nt, Artificial Sequence
  Synthetic
gaagaagacugggaaguau

SEQ ID NO: 2570 - RNA, 19 nt, Artificial Sequence
  Synthetic
ggaaaagagugcugagaaa

SEQ ID NO: 2571 - RNA, 19 nt, Artificial Sequence
  Synthetic
auaaagauccugagagaaa

SEQ ID NO: 2572 - RNA, 19 nt, Artificial Sequence
  Synthetic
aaauaaagauccugagaga

SEQ ID NO: 2573 - RNA, 19 nt, Artificial Sequence
  Synthetic
gagcauagguugucugcaa

SEQ ID NO: 2574 - RNA, 19 nt, Artificial Sequence
  Synthetic
cuucagagguggauugaua

SEQ ID NO: 2575 - RNA, 19 nt, Artificial Sequence
  Synthetic
ggaagaggaugaugaacaa

SEQ ID NO: 2576 - RNA, 19 nt, Artificial Sequence
  Synthetic
uagaagagauugagagcau

SEQ ID NO: 2577 - RNA, 19 nt, Artificial Sequence
  Synthetic
gagaaauggcucuguauaa

SEQ ID NO: 2578 - RNA, 19 nt, Artificial Sequence
  Synthetic
ucggaaauauggagcauua

SEQ ID NO: 2579 - RNA, 19 nt, Artificial Sequence
  Synthetic
aggcuaaaauacagagaua

SEQ ID NO: 2580 - RNA, 19 nt, Artificial Sequence
  Synthetic
ggaaaguggucaagcagau

SEQ ID NO: 2581 - RNA, 19 nt, Artificial Sequence
  Synthetic
aggaagaacaagaagaaaa

SEQ ID NO: 2582 - RNA, 19 nt, Artificial Sequence
  Synthetic
gcauugaccaggaaauaaa

SEQ ID NO: 2583 - RNA, 19 nt, Artificial Sequence
  Synthetic
aguaaagugucaagugauu

SEQ ID NO: 2584 - RNA, 19 nt, Artificial Sequence
  Synthetic
aggaagaggaugaugaaca

SEQ ID NO: 2585 - RNA, 19 nt, Artificial Sequence
  Synthetic
cagcaagcgucuagaucau

SEQ ID NO: 2586 - RNA, 19 nt, Artificial Sequence
  Synthetic
caacuaugacggugaguga

SEQ ID NO: 2587 - RNA, 19 nt, Artificial Sequence
  Synthetic
agagauacaagcagaagaa

SEQ ID NO: 2588 - RNA, 19 nt, Artificial Sequence
  Synthetic
caccagaggaauucagaaa

SEQ ID NO: 2589 - RNA, 19 nt, Artificial Sequence
  Synthetic
aaguagaaguggcgacuga

SEQ ID NO: 2590 - RNA, 19 nt, Artificial Sequence
  Synthetic
aggcagcaccagaggaauu

SEQ ID NO: 2591 - RNA, 19 nt, Artificial Sequence
  Synthetic
gagcauugaccaggaaaua

SEQ ID NO: 2592 - RNA, 19 nt, Artificial Sequence
  Synthetic
gcuaaaauacagagauaca

SEQ ID NO: 2593 - RNA, 19 nt, Artificial Sequence
  Synthetic
aaugaaaucugcuguggaa

SEQ ID NO: 2594 - RNA, 19 nt, Artificial Sequence
  Synthetic
acaggaagaacaagaagaa

SEQ ID NO: 2595 - RNA, 19 nt, Artificial Sequence
  Synthetic
gauacaagcagaagaagga

SEQ ID NO: 2596 - RNA, 19 nt, Artificial Sequence
  Synthetic
ugggaugacuggaaggaca

SEQ ID NO: 2597 - RNA, 19 nt, Artificial Sequence
  Synthetic
aagaagaaaaggaggaaga

SEQ ID NO: 2598 - RNA, 19 nt, Artificial Sequence
  Synthetic
agaagaaggaguuggagca

SEQ ID NO: 2599 - RNA, 19 nt, Artificial Sequence
  Synthetic
cagaaaagcagcucagcaa

SEQ ID NO: 2600 - RNA, 19 nt, Artificial Sequence
  Synthetic
gguaaagacugaagggaaa

SEQ ID NO: 2601 - RNA, 19 nt, Artificial Sequence
  Synthetic
ggaaaggagcaaagagaaa

SEQ ID NO: 2602 - RNA, 19 nt, Artificial Sequence
  Synthetic
gugaagagcuuguggaaaa

SEQ ID NO: 2603 - RNA, 19 nt, Artificial Sequence
  Synthetic
uguaaucaguguagagaaa

SEQ ID NO: 2604 - RNA, 19 nt, Artificial Sequence
  Synthetic
cagaagaagccgugaacuu

SEQ ID NO: 2605 - RNA, 19 nt, Artificial Sequence
  Synthetic
cgggaaagaagcucagaaa

SEQ ID NO: 2606 - RNA, 19 nt, Artificial Sequence
  Synthetic
ugguaaagacugaagggaa

SEQ ID NO: 2607 - RNA, 19 nt, Artificial Sequence
  Synthetic
ugauggacauggaggaauu

SEQ ID NO: 2608 - RNA, 19 nt, Artificial Sequence
  Synthetic
gggaaaggagcaaagagaa

SEQ ID NO: 2609 - RNA, 19 nt, Artificial Sequence
  Synthetic
guuauaaugaggagaguca

SEQ ID NO: 2610 - RNA, 19 nt, Artificial Sequence
  Synthetic
acagaaggcuggaggaaac

SEQ ID NO: 2611 - RNA, 19 nt, Artificial Sequence
  Synthetic
gcaacaggcuggccaacaa

SEQ ID NO: 2612 - RNA, 19 nt, Artificial Sequence
  Synthetic
gcuauguggcugagcggaa

SEQ ID NO: 2613 - RNA, 19 nt, Artificial Sequence
  Synthetic
agggaaaggagcaaagaga

SEQ ID NO: 2614 - RNA, 19 nt, Artificial Sequence
  Synthetic
uauaaugaggagagucaaa

SEQ ID NO: 2615 - RNA, 19 nt, Artificial Sequence
  Synthetic
ggaaagaagcucagaaagg

SEQ ID NO: 2616 - RNA, 19 nt, Artificial Sequence
  Synthetic
ucaauaucccagaugguaa

SEQ ID NO: 2617 - RNA, 19 nt, Artificial Sequence
  Synthetic
caauaucccagaugguaaa

SEQ ID NO: 2618 - RNA, 19 nt, Artificial Sequence
  Synthetic
augaagaguuccuuaaaca

SEQ ID NO: 2619 - RNA, 19 nt, Artificial Sequence
  Synthetic
gcauaauccaacucaguau

SEQ ID NO: 2620 - RNA, 19 nt, Artificial Sequence
  Synthetic
cagugaagagcuuguggaa

SEQ ID NO: 2621 - RNA, 19 nt, Artificial Sequence
  Synthetic
ucccaugguuguaaauaaa

SEQ ID NO: 2622 - RNA, 19 nt, Artificial Sequence
  Synthetic
gaauggcagugaagagcuu

SEQ ID NO: 2623 - RNA, 19 nt, Artificial Sequence
  Synthetic
aaacaagcuuccagccaga

SEQ ID NO: 2624 - RNA, 19 nt, Artificial Sequence
  Synthetic
agagaagaauggcagugaa

SEQ ID NO: 2625 - RNA, 19 nt, Artificial Sequence
  Synthetic
augaagagcggaugaggau

SEQ ID NO: 2626 - RNA, 19 nt, Artificial Sequence
  Synthetic
cucccaugguuguaaauaa

SEQ ID NO: 2627 - RNA, 19 nt, Artificial Sequence
  Synthetic
gguuguaaauaaagguuuc

SEQ ID NO: 2628 - RNA, 19 nt, Artificial Sequence
  Synthetic
ggaggaaacgucagggaug

SEQ ID NO: 2629 - RNA, 19 nt, Artificial Sequence
  Synthetic
cugugaugguggugcggau

SEQ ID NO: 2630 - RNA, 19 nt, Artificial Sequence
  Synthetic
guauauaggugcagagaca

SEQ ID NO: 2631 - RNA, 19 nt, Artificial Sequence
  Synthetic
gcuuuaaagucuuguguaa

SEQ ID NO: 2632 - RNA, 19 nt, Artificial Sequence
  Synthetic
aagacaagcuggagaggua

SEQ ID NO: 2633 - RNA, 19 nt, Artificial Sequence
  Synthetic
gggcauuucugcagugaau

SEQ ID NO: 2634 - RNA, 19 nt, Artificial Sequence
  Synthetic
aaacagacuacuagacuua

SEQ ID NO: 2635 - RNA, 19 nt, Artificial Sequence
  Synthetic
caccagagacugugagaau

SEQ ID NO: 2636 - RNA, 19 nt, Artificial Sequence
  Synthetic
gcuaaagaaauucagguua

SEQ ID NO: 2637 - RNA, 19 nt, Artificial Sequence
  Synthetic
gaaaggauagcuaaagaaa

SEQ ID NO: 2638 - RNA, 19 nt, Artificial Sequence
  Synthetic
gguaguuugugaagcuaua

SEQ ID NO: 2639 - RNA, 19 nt, Artificial Sequence
  Synthetic
gaauauuagcagaaaggau

SEQ ID NO: 2640 - RNA, 19 nt, Artificial Sequence
  Synthetic
cagaaaggauagcuaaaga

SEQ ID NO: 2641 - RNA, 19 nt, Artificial Sequence
  Synthetic
uggcuuugcuguaaauaaa

SEQ ID NO: 2642 - RNA, 19 nt, Artificial Sequence
  Synthetic
gcacguaaacagacuacua

SEQ ID NO: 2643 - RNA, 19 nt, Artificial Sequence
  Synthetic
acuacaaguuucacaacaa

SEQ ID NO: 2644 - RNA, 19 nt, Artificial Sequence
  Synthetic
caucaauggauauguguuu

SEQ ID NO: 2645 - RNA, 19 nt, Artificial Sequence
  Synthetic
caucagauagcauggcuua

SEQ ID NO: 2646 - RNA, 19 nt, Artificial Sequence
  Synthetic
ggaaacauacccaggaagu

SEQ ID NO: 2647 - RNA, 19 nt, Artificial Sequence
  Synthetic
ggcaggaaugcauggauua

SEQ ID NO: 2648 - RNA, 19 nt, Artificial Sequence
  Synthetic
caggaaguacaguugauaa

SEQ ID NO: 2649 - RNA, 19 nt, Artificial Sequence
  Synthetic
uggcaggaaugcauggauu

SEQ ID NO: 2650 - RNA, 19 nt, Artificial Sequence
  Synthetic
ggugacucaucaauggaua

SEQ ID NO: 2651 - RNA, 19 nt, Artificial Sequence
  Synthetic
ugcaguaacucuagcaaga

SEQ ID NO: 2652 - RNA, 19 nt, Artificial Sequence
  Synthetic
agcagaaaggauagcuaaa

SEQ ID NO: 2653 - RNA, 19 nt, Artificial Sequence
  Synthetic
agauguacacugccagaaa

SEQ ID NO: 2654 - RNA, 19 nt, Artificial Sequence
  Synthetic
gguuugacugcuauaauua

SEQ ID NO: 2655 - RNA, 19 nt, Artificial Sequence
  Synthetic
gcaccuggcccauuacaua

SEQ ID NO: 2656 - RNA, 19 nt, Artificial Sequence
  Synthetic
ggauguuacagguggacca

SEQ ID NO: 2657 - RNA, 19 nt, Artificial Sequence
  Synthetic
ggauuaugcaguaacucua

SEQ ID NO: 2658 - RNA, 19 nt, Artificial Sequence
  Synthetic
uguuacagguggaccauuu

SEQ ID NO: 2659 - RNA, 19 nt, Artificial Sequence
  Synthetic
agaaaggauagcuaaagaa

SEQ ID NO: 2660 - RNA, 19 nt, Artificial Sequence
  Synthetic
acucaaaucuccugugaaa

SEQ ID NO: 2661 - RNA, 19 nt, Artificial Sequence
  Synthetic
cugcagaucuugugacaga

SEQ ID NO: 2662 - RNA, 19 nt, Artificial Sequence
  Synthetic
ucaaaucuccugugaaaua

SEQ ID NO: 2663 - RNA, 19 nt, Artificial Sequence
  Synthetic
gcucauagcucaggccuua

SEQ ID NO: 2664 - RNA, 19 nt, Artificial Sequence
  Synthetic
caggacagaucaucagaaa

SEQ ID NO: 2665 - RNA, 19 nt, Artificial Sequence
  Synthetic
gcuugaauucggagugauu

SEQ ID NO: 2666 - RNA, 19 nt, Artificial Sequence
  Synthetic
cagaucaccuuguggaaga

SEQ ID NO: 2667 - RNA, 19 nt, Artificial Sequence
  Synthetic
gcaauuuugugcacagauu

SEQ ID NO: 2668 - RNA, 19 nt, Artificial Sequence
  Synthetic
ccacagucaucaucagaga

SEQ ID NO: 2669 - RNA, 19 nt, Artificial Sequence
  Synthetic
ugacugcggcugaggcaaa

SEQ ID NO: 2670 - RNA, 19 nt, Artificial Sequence
  Synthetic
gguaauaaggcuuuagaac

SEQ ID NO: 2671 - RNA, 19 nt, Artificial Sequence
  Synthetic
uggauuugcuguucgacaa

SEQ ID NO: 2672 - RNA, 19 nt, Artificial Sequence
  Synthetic
guaauaaggcuuuagaacu

SEQ ID NO: 2673 - RNA, 19 nt, Artificial Sequence
  Synthetic
gcagaucuugugacagaaa

SEQ ID NO: 2674 - RNA, 19 nt, Artificial Sequence
  Synthetic
ucucaaaggccuugguucu

SEQ ID NO: 2675 - RNA, 19 nt, Artificial Sequence
  Synthetic
uugaauucggagugauuua

SEQ ID NO: 2676 - RNA, 19 nt, Artificial Sequence
  Synthetic
gcuuuagaacugcugauaa

SEQ ID NO: 2677 - RNA, 19 nt, Artificial Sequence
  Synthetic
uaauaaggcuuuagaacug

SEQ ID NO: 2678 - RNA, 19 nt, Artificial Sequence
  Synthetic
ccuuacagacgauuaacua

SEQ ID NO: 2679 - RNA, 19 nt, Artificial Sequence
  Synthetic
cugaguugcgagagagguu

SEQ ID NO: 2680 - RNA, 19 nt, Artificial Sequence
  Synthetic
acacagguucauugcagaa

SEQ ID NO: 2681 - RNA, 19 nt, Artificial Sequence
  Synthetic
cgacuguggcgguuagcau

SEQ ID NO: 2682 - RNA, 19 nt, Artificial Sequence
  Synthetic
gggagauggcgaugcucau

SEQ ID NO: 2683 - RNA, 19 nt, Artificial Sequence
  Synthetic
ggacagaucaucagaaaag

SEQ ID NO: 2684 - RNA, 19 nt, Artificial Sequence
  Synthetic
ucaccuuguggaagauuua

SEQ ID NO: 2685 - RNA, 19 nt, Artificial Sequence
  Synthetic
auuucugaguugcgagaga

SEQ ID NO: 2686 - RNA, 19 nt, Artificial Sequence
  Synthetic
gugaguggcuggccuuuua

SEQ ID NO: 2687 - RNA, 19 nt, Artificial Sequence
  Synthetic
gagcuugaauucggaguga

SEQ ID NO: 2688 - RNA, 19 nt, Artificial Sequence
  Synthetic
caggcggcaucgugauaga

SEQ ID NO: 2689 - RNA, 19 nt, Artificial Sequence
  Synthetic
ugauaaagcggaucguucu

SEQ ID NO: 2690 - RNA, 19 nt, Artificial Sequence
  Synthetic
agaaagaaauccagaaaca

SEQ ID NO: 2691 - RNA, 19 nt, Artificial Sequence
  Synthetic
gcaaaguccucaaugguaa

SEQ ID NO: 2692 - RNA, 19 nt, Artificial Sequence
  Synthetic
gaaagaaugcuuagaaaga

SEQ ID NO: 2693 - RNA, 19 nt, Artificial Sequence
  Synthetic
ggaagaaacagcagagcuu

SEQ ID NO: 2694 - RNA, 19 nt, Artificial Sequence
  Synthetic
agaagaaacggcagugaaa

SEQ ID NO: 2695 - RNA, 19 nt, Artificial Sequence
  Synthetic
cagcagagcuucuuagcaa

SEQ ID NO: 2696 - RNA, 19 nt, Artificial Sequence
  Synthetic
gaauaguagacuugaaaga

SEQ ID NO: 2697 - RNA, 19 nt, Artificial Sequence
  Synthetic
cguaauuaguacaagugaa

SEQ ID NO: 2698 - RNA, 19 nt, Artificial Sequence
  Synthetic
gggaauaguagacuugaaa

SEQ ID NO: 2699 - RNA, 19 nt, Artificial Sequence
  Synthetic
aagaaaagaaagagggaga

SEQ ID NO: 2700 - RNA, 19 nt, Artificial Sequence
  Synthetic
gguagcaucugaagcauua

SEQ ID NO: 2701 - RNA, 19 nt, Artificial Sequence
  Synthetic
agaagaauccaaugaguuu

SEQ ID NO: 2702 - RNA, 19 nt, Artificial Sequence
  Synthetic
ggaagcggcuggagacauu

SEQ ID NO: 2703 - RNA, 19 nt, Artificial Sequence
  Synthetic
ccucaaugguaacaaggua

SEQ ID NO: 2704 - RNA, 19 nt, Artificial Sequence
  Synthetic
guucagaaaugucagauau

SEQ ID NO: 2705 - RNA, 19 nt, Artificial Sequence
  Synthetic
aacagaauauggagaacaa

SEQ ID NO: 2706 - RNA, 19 nt, Artificial Sequence
  Synthetic
gaaaagaaagagggagaaa

SEQ ID NO: 2707 - RNA, 19 nt, Artificial Sequence
  Synthetic
gagaaaagaacaagaaguu

SEQ ID NO: 2708 - RNA, 19 nt, Artificial Sequence
  Synthetic
caaucaaccuuuuguguca

SEQ ID NO: 2709 - RNA, 19 nt, Artificial Sequence
  Synthetic
aagaaacggcagugaaaca

SEQ ID NO: 2710 - RNA, 19 nt, Artificial Sequence
  Synthetic
gagaagaauccaaugaguu

SEQ ID NO: 2711 - RNA, 19 nt, Artificial Sequence
  Synthetic
uaucaaagcugcauuguca

SEQ ID NO: 2712 - RNA, 19 nt, Artificial Sequence
  Synthetic
agaaagagggagaaaagaa

SEQ ID NO: 2713 - RNA, 19 nt, Artificial Sequence
  Synthetic
gguggaaaggacagugcua

SEQ ID NO: 2714 - RNA, 19 nt, Artificial Sequence
  Synthetic
uggaaaggacagugcuauu

SEQ ID NO: 2715 - RNA, 19 nt, Artificial Sequence
  Synthetic
caacaagggaggacucauu

SEQ ID NO: 2716 - RNA, 19 nt, Artificial Sequence
  Synthetic
gagccuauguguuguccaa

SEQ ID NO: 2717 - RNA, 19 nt, Artificial Sequence
  Synthetic
ugguacaggaaguuauaaa

SEQ ID NO: 2718 - RNA, 19 nt, Artificial Sequence
  Synthetic
agggaggacucauugcaua

SEQ ID NO: 2719 - RNA, 19 nt, Artificial Sequence
  Synthetic
gugaaacacacacuggaaa

SEQ ID NO: 2720 - RNA, 19 nt, Artificial Sequence
  Synthetic
ccacaugguccgagagcaa

SEQ ID NO: 2721 - RNA, 19 nt, Artificial Sequence
  Synthetic
uggcaaugcuggaggacau

SEQ ID NO: 2722 - RNA, 19 nt, Artificial Sequence
  Synthetic
ccgaagggacuuacggaaa

SEQ ID NO: 2723 - RNA, 19 nt, Artificial Sequence
  Synthetic
caucauagguugcauuuaa

SEQ ID NO: 2724 - RNA, 19 nt, Artificial Sequence
  Synthetic
ccaagaaggccaugguauu

SEQ ID NO: 2725 - RNA, 19 nt, Artificial Sequence
  Synthetic
gugcaugcccggaagaaua

SEQ ID NO: 2726 - RNA, 19 nt, Artificial Sequence
  Synthetic
ucaucaacguggagaguuu

SEQ ID NO: 2727 - RNA, 19 nt, Artificial Sequence
  Synthetic
ggaucauggacuugaggaa

SEQ ID NO: 2728 - RNA, 19 nt, Artificial Sequence
  Synthetic
auacaaaggaugagaguuc

SEQ ID NO: 2729 - RNA, 19 nt, Artificial Sequence
  Synthetic
ccacaaacuugcacauaca

SEQ ID NO: 2730 - RNA, 19 nt, Artificial Sequence
  Synthetic
ggacaugagccuugggauc

SEQ ID NO: 2731 - RNA, 19 nt, Artificial Sequence
  Synthetic
uugaagagaccaagaaaca

SEQ ID NO: 2732 - RNA, 19 nt, Artificial Sequence
  Synthetic
acaaauuugaagagaccaa

SEQ ID NO: 2733 - RNA, 19 nt, Artificial Sequence
  Synthetic
agacugaaggauugguuua

SEQ ID NO: 2734 - RNA, 19 nt, Artificial Sequence
  Synthetic
guguaugaugucaaagaua

SEQ ID NO: 2735 - RNA, 19 nt, Artificial Sequence
  Synthetic
gaauaagaacgucgacauu

SEQ ID NO: 2736 - RNA, 19 nt, Artificial Sequence
  Synthetic
gaugagaguucaagacgau

SEQ ID NO: 2737 - RNA, 19 nt, Artificial Sequence
  Synthetic
gcuggcagauggaggagaa

SEQ ID NO: 2738 - RNA, 19 nt, Artificial Sequence
  Synthetic
gaagagaccaagaaacauu

SEQ ID NO: 2739 - RNA, 19 nt, Artificial Sequence
  Synthetic
gcacaaauuugaagagacc

SEQ ID NO: 2740 - RNA, 19 nt, Artificial Sequence
  Synthetic
cgaagggacuuacggaaaa

SEQ ID NO: 2741 - RNA, 19 nt, Artificial Sequence
  Synthetic
cugccaagguuuuaaguca

SEQ ID NO: 2742 - RNA, 19 nt, Artificial Sequence
  Synthetic
gggagaaaguguggcugaa

SEQ ID NO: 2743 - RNA, 19 nt, Artificial Sequence
  Synthetic
caguuugaaagcagauaaa

SEQ ID NO: 2744 - RNA, 19 nt, Artificial Sequence
  Synthetic
ggagguagucacccagaaa

SEQ ID NO: 2745 - RNA, 19 nt, Artificial Sequence
  Synthetic
cagugaggguugucgaaga

SEQ ID NO: 2746 - RNA, 19 nt, Artificial Sequence
  Synthetic
gccgagagguuuggcgaua

SEQ ID NO: 2747 - RNA, 19 nt, Artificial Sequence
  Synthetic
ugacggaggcguuaggaau

SEQ ID NO: 2748 - RNA, 19 nt, Artificial Sequence
  Synthetic
ucaagacgauggaggauca

SEQ ID NO: 2749 - RNA, 19 nt, Artificial Sequence
  Synthetic
ggacaagagccuagagugc

SEQ ID NO: 2750 - RNA, 19 nt, Artificial Sequence
  Synthetic
gcagaaaccaggagauaaa

SEQ ID NO: 2751 - RNA, 19 nt, Artificial Sequence
  Synthetic
cgaugaaauuggaauguua

SEQ ID NO: 2752 - RNA, 19 nt, Artificial Sequence
  Synthetic
ccacagauguacagggaca

SEQ ID NO: 2753 - RNA, 19 nt, Artificial Sequence
  Synthetic
ggacaaacugauugaaaga

SEQ ID NO: 2754 - RNA, 19 nt, Artificial Sequence
  Synthetic
gagaauguacugaagaaua

SEQ ID NO: 2755 - RNA, 19 nt, Artificial Sequence
  Synthetic
cagcagcaaaggagagaaa

SEQ ID NO: 2756 - RNA, 19 nt, Artificial Sequence
  Synthetic
ccagacagcuugaagaauu

SEQ ID NO: 2757 - RNA, 19 nt, Artificial Sequence
  Synthetic
ucuaugaugucaaggauaa

SEQ ID NO: 2758 - RNA, 19 nt, Artificial Sequence
  Synthetic
ccgaaauuguggagggaac

SEQ ID NO: 2759 - RNA, 19 nt, Artificial Sequence
  Synthetic
caaaggaaguucucagcaa

SEQ ID NO: 2760 - RNA, 19 nt, Artificial Sequence
  Synthetic
ccggaaagugugagcggaa

SEQ ID NO: 2761 - RNA, 19 nt, Artificial Sequence
  Synthetic
aaagaagauuugugcagaa

SEQ ID NO: 2762 - RNA, 19 nt, Artificial Sequence
  Synthetic
gacaauaaguggaugcgaa

SEQ ID NO: 2763 - RNA, 19 nt, Artificial Sequence
  Synthetic
gugcagaaaccaggagaua

SEQ ID NO: 2764 - RNA, 19 nt, Artificial Sequence
  Synthetic
ugaaagagaugguggcagu

SEQ ID NO: 2765 - RNA, 19 nt, Artificial Sequence
  Synthetic
gugaucaaauggugaauau

SEQ ID NO: 2766 - RNA, 19 nt, Artificial Sequence
  Synthetic
ccagaagacuccaaaugaa

SEQ ID NO: 2767 - RNA, 19 nt, Artificial Sequence
  Synthetic
gguugaucauggaaauuaa

SEQ ID NO: 2768 - RNA, 19 nt, Artificial Sequence
  Synthetic
gaagguugaucauggaaau

SEQ ID NO: 2769 - RNA, 19 nt, Artificial Sequence
  Synthetic
uagagaauguacugaagaa

SEQ ID NO: 2770 - RNA, 19 nt, Artificial Sequence
  Synthetic
ccauagauuugaaacagaa

SEQ ID NO: 2771 - RNA, 19 nt, Artificial Sequence
  Synthetic
ggaaagugugagcggaaaa

SEQ ID NO: 2772 - RNA, 19 nt, Artificial Sequence
  Synthetic
guacauacagcgaugaaau

SEQ ID NO: 2773 - RNA, 19 nt, Artificial Sequence
  Synthetic
cagacuaugaugaggaaga

SEQ ID NO: 2774 - RNA, 19 nt, Artificial Sequence
  Synthetic
uaucagaucuuuaguguga

SEQ ID NO: 2775 - RNA, 19 nt, Artificial Sequence
  Synthetic
uggcaacaaugauggagaa

SEQ ID NO: 2776 - RNA, 19 nt, Artificial Sequence
  Synthetic
gcauagagaauguacugaa

SEQ ID NO: 2777 - RNA, 19 nt, Artificial Sequence
  Synthetic
ccaucuaugaggagaccaa

SEQ ID NO: 2778 - RNA, 19 nt, Artificial Sequence
  Synthetic
ccgcaaacugaaugguauu

SEQ ID NO: 2779 - RNA, 19 nt, Artificial Sequence
  Synthetic
uaaagaacccaguauguaa

SEQ ID NO: 2780 - RNA, 19 nt, Artificial Sequence
  Synthetic
cagaaaaccugcagaagaa

SEQ ID NO: 2781 - RNA, 19 nt, Artificial Sequence
  Synthetic
ggucggagagcgaggagaa

SEQ ID NO: 2782 - RNA, 19 nt, Artificial Sequence
  Synthetic
caugggagaaauagaaaua

SEQ ID NO: 2783 - RNA, 19 nt, Artificial Sequence
  Synthetic
aaagagaucuacucggaua

SEQ ID NO: 2784 - RNA, 19 nt, Artificial Sequence
  Synthetic
auagaaaggucgcuggcaa

SEQ ID NO: 2785 - RNA, 19 nt, Artificial Sequence
  Synthetic
ccuuugacuuggugaauau

SEQ ID NO: 2786 - RNA, 19 nt, Artificial Sequence
  Synthetic
caguuugacuuuaaagcua

SEQ ID NO: 2787 - RNA, 19 nt, Artificial Sequence
  Synthetic
gcuaagaaguauagaaagg

SEQ ID NO: 2788 - RNA, 19 nt, Artificial Sequence
  Synthetic
gcuacgugcuggacagaau

SEQ ID NO: 2789 - RNA, 19 nt, Artificial Sequence
  Synthetic
agcaguaaguacagcauua

SEQ ID NO: 2790 - RNA, 19 nt, Artificial Sequence
  Synthetic
uagaaaggucgcuggcaaa

SEQ ID NO: 2791 - RNA, 19 nt, Artificial Sequence
  Synthetic
ggagaaguuucgcagacua

SEQ ID NO: 2792 - RNA, 19 nt, Artificial Sequence
  Synthetic
uaacaugggcuguauauaa

SEQ ID NO: 2793 - RNA, 19 nt, Artificial Sequence
  Synthetic
uggacaaguucgucaaaga

SEQ ID NO: 2794 - RNA, 19 nt, Artificial Sequence
  Synthetic
ggcacaaggcacugggcua

SEQ ID NO: 2795 - RNA, 19 nt, Artificial Sequence
  Synthetic
ccaaugaaguggugaagcu

SEQ ID NO: 2796 - RNA, 19 nt, Artificial Sequence
  Synthetic
gagucuaccuggaugaaaa

SEQ ID NO: 2797 - RNA, 19 nt, Artificial Sequence
  Synthetic
ggacaaguucgucaaagaa

SEQ ID NO: 2798 - RNA, 19 nt, Artificial Sequence
  Synthetic
gucauaaccuuguugcaaa

SEQ ID NO: 2799 - RNA, 19 nt, Artificial Sequence
  Synthetic
gugaugcgaugaaagaaua

SEQ ID NO: 2800 - RNA, 19 nt, Artificial Sequence
  Synthetic
gugcaaauggucaagaaaa

SEQ ID NO: 2801 - RNA, 19 nt, Artificial Sequence
  Synthetic
gcaaagagaucuacucgga

SEQ ID NO: 2802 - RNA, 19 nt, Artificial Sequence
  Synthetic
auuagaaggugauuagaga

SEQ ID NO: 2803 - RNA, 19 nt, Artificial Sequence
  Synthetic
guggagacgcucugcacaa

SEQ ID NO: 2804 - RNA, 19 nt, Artificial Sequence
  Synthetic
gacaacgaccggaagguua

SEQ ID NO: 2805 - RNA, 19 nt, Artificial Sequence
  Synthetic
gaaggugauuagagagucu

SEQ ID NO: 2806 - RNA, 19 nt, Artificial Sequence
  Synthetic
caacacacaaauucguaaa

SEQ ID NO: 2807 - RNA, 19 nt, Artificial Sequence
  Synthetic
cgagugaugcgaugaaaga

SEQ ID NO: 2808 - RNA, 19 nt, Artificial Sequence
  Synthetic
gagugcaaauggucaagaa

SEQ ID NO: 2809 - RNA, 19 nt, Artificial Sequence
  Synthetic
agaaguuuccgcaggacua

SEQ ID NO: 2810 - RNA, 19 nt, Artificial Sequence
  Synthetic
gaggaagcaggcagggaaa

SEQ ID NO: 2811 - RNA, 19 nt, Artificial Sequence
  Synthetic
ggaugaggagcuugaggaa

SEQ ID NO: 2812 - RNA, 19 nt, Artificial Sequence
  Synthetic
cggaagaaacgguggggau

SEQ ID NO: 2813 - RNA, 19 nt, Artificial Sequence
  Synthetic
ggaagaaacgguggggauu

SEQ ID NO: 2814 - RNA, 19 nt, Artificial Sequence
  Synthetic
ugaggaagcaggcagggaa

SEQ ID NO: 2815 - RNA, 19 nt, Artificial Sequence
  Synthetic
aagacaggcuuucgauuga

SEQ ID NO: 2816 - RNA, 19 nt, Artificial Sequence
  Synthetic
ccaaaguccugguggcccu

SEQ ID NO: 2817 - RNA, 19 nt, Artificial Sequence
  Synthetic
guuccaggcucuugaaaua

SEQ ID NO: 2818 - RNA, 19 nt, Artificial Sequence
  Synthetic
cgacagggaugaaguacaa

SEQ ID NO: 2819 - RNA, 19 nt, Artificial Sequence
  Synthetic
ggguggagauauagauaau

SEQ ID NO: 2820 - RNA, 19 nt, Artificial Sequence
  Synthetic
gcaaggagcucuauggaga

SEQ ID NO: 2821 - RNA, 19 nt, Artificial Sequence
  Synthetic
gggagaagcucuaugacuu

SEQ ID NO: 2822 - RNA, 19 nt, Artificial Sequence
  Synthetic
ggacaagagccaagggaag

SEQ ID NO: 2823 - RNA, 19 nt, Artificial Sequence
  Synthetic
aaacagagaaggagaagau

SEQ ID NO: 2824 - RNA, 19 nt, Artificial Sequence
  Synthetic
gcuaagugcuuuacgaaca

SEQ ID NO: 2825 - RNA, 19 nt, Artificial Sequence
  Synthetic
gaguuuuacaagaaggaaa

SEQ ID NO: 2826 - RNA, 19 nt, Artificial Sequence
  Synthetic
gcaccuggaacauggguaa

SEQ ID NO: 2827 - RNA, 19 nt, Artificial Sequence
  Synthetic
ugaauaaguuggugaucuu

SEQ ID NO: 2828 - RNA, 19 nt, Artificial Sequence
  Synthetic
ggaauugcguuuacacuua

SEQ ID NO: 2829 - RNA, 19 nt, Artificial Sequence
  Synthetic
gaauuaauguagggagcua

SEQ ID NO: 2830 - RNA, 19 nt, Artificial Sequence
  Synthetic
gcucauuaagucacagaaa

SEQ ID NO: 2831 - RNA, 19 nt, Artificial Sequence
  Synthetic
cgacguugagucugggaaa

SEQ ID NO: 2832 - RNA, 19 nt, Artificial Sequence
  Synthetic
cugcauugcccuucgguua

SEQ ID NO: 2833 - RNA, 19 nt, Artificial Sequence
  Synthetic
gagaaggaguggcuggaga

SEQ ID NO: 2834 - RNA, 19 nt, Artificial Sequence
  Synthetic
gcccaaugaagaugauaaa

SEQ ID NO: 2835 - RNA, 19 nt, Artificial Sequence
  Synthetic
acaaauacgccuacaccaa

SEQ ID NO: 2836 - RNA, 19 nt, Artificial Sequence
  Synthetic
ggaaacugaucauuaagaa

SEQ ID NO: 2837 - RNA, 19 nt, Artificial Sequence
  Synthetic
gcagaaaccaucauccaaa

SEQ ID NO: 2838 - RNA, 19 nt, Artificial Sequence
  Synthetic
agaccaagucccagaccaa

SEQ ID NO: 2839 - RNA, 19 nt, Artificial Sequence
  Synthetic
gggacaagagccaagggaa

SEQ ID NO: 2840 - RNA, 19 nt, Artificial Sequence
  Synthetic
gaaaagaaacucaggcgaa

SEQ ID NO: 2841 - RNA, 19 nt, Artificial Sequence
  Synthetic
gcacgaggguccugagucu

SEQ ID NO: 2842 - RNA, 19 nt, Artificial Sequence
  Synthetic
gcagaaagcgacagggaug

SEQ ID NO: 2843 - RNA, 19 nt, Artificial Sequence
  Synthetic
uggaaacagagaaggagaa

SEQ ID NO: 2844 - RNA, 19 nt, Artificial Sequence
  Synthetic
gagacugacucgggacaaa

SEQ ID NO: 2845 - RNA, 19 nt, Artificial Sequence
  Synthetic
ggugaaguuuggugagacu

SEQ ID NO: 2846 - RNA, 19 nt, Artificial Sequence
  Synthetic
cgguuagaggccacagaaa

SEQ ID NO: 2847 - RNA, 19 nt, Artificial Sequence
  Synthetic
gcgaaauaccuuaguggaa

SEQ ID NO: 2848 - RNA, 19 nt, Artificial Sequence
  Synthetic
cgagauaugaagcgaaaua

SEQ ID NO: 2849 - RNA, 19 nt, Artificial Sequence
  Synthetic
gagaaaugguagaaaucau

SEQ ID NO: 2850 - RNA, 19 nt, Artificial Sequence
  Synthetic
gaauaaguuuggacaguuu

SEQ ID NO: 2851 - RNA, 19 nt, Artificial Sequence
  Synthetic
cgaaggagauucagaggca

SEQ ID NO: 2852 - RNA, 19 nt, Artificial Sequence
  Synthetic
gaaauaccuuaguggaauu

SEQ ID NO: 2853 - RNA, 19 nt, Artificial Sequence
  Synthetic
gguccugagcagugagaga

SEQ ID NO: 2854 - RNA, 19 nt, Artificial Sequence
  Synthetic
uggcaaauuugauagagaa

SEQ ID NO: 2855 - RNA, 19 nt, Artificial Sequence
  Synthetic
cgaaauaccuuaguggaau

SEQ ID NO: 2856 - RNA, 19 nt, Artificial Sequence
  Synthetic
uugccaagcuagaaagaga

SEQ ID NO: 2857 - RNA, 19 nt, Artificial Sequence
  Synthetic
agucagaacuccagcacca

SEQ ID NO: 2858 - RNA, 19 nt, Artificial Sequence
  Synthetic
cguccaaggcggagaaucu

SEQ ID NO: 2859 - RNA, 19 nt, Artificial Sequence
  Synthetic
gcucagagguggagugcuc

SEQ ID NO: 2860 - RNA, 19 nt, Artificial Sequence
  Synthetic
ccaagacagguucgagaaa

SEQ ID NO: 2861 - RNA, 19 nt, Artificial Sequence
  Synthetic
gacaagggcuggaggagga

SEQ ID NO: 2862 - RNA, 19 nt, Artificial Sequence
  Synthetic
agacggauuucgaaggaga

SEQ ID NO: 2863 - RNA, 19 nt, Artificial Sequence
  Synthetic
gggaaggacacguacgaca

SEQ ID NO: 2864 - RNA, 19 nt, Artificial Sequence
  Synthetic
gggauugccaagcuagaaa

SEQ ID NO: 2865 - RNA, 19 nt, Artificial Sequence
  Synthetic
cggaaaggguccaucuuca

SEQ ID NO: 2866 - RNA, 19 nt, Artificial Sequence
  Synthetic
cuggcaaauuugauagaga

SEQ ID NO: 2867 - RNA, 19 nt, Artificial Sequence
  Synthetic
gaaaugugcccgacaccaa

SEQ ID NO: 2868 - RNA, 19 nt, Artificial Sequence
  Synthetic
gcguggcaucucagaauaa

SEQ ID NO: 2869 - RNA, 19 nt, Artificial Sequence
  Synthetic
gguccaucuucaagggcuu

SEQ ID NO: 2870 - RNA, 19 nt, Artificial Sequence
  Synthetic
cagaauaaguuuggacagu

SEQ ID NO: 2871 - RNA, 19 nt, Artificial Sequence
  Synthetic
aaaguaaccacauuggaua

SEQ ID NO: 2872 - RNA, 19 nt, Artificial Sequence
  Synthetic
caguaggaauucuuaucaa

SEQ ID NO: 2873 - RNA, 19 nt, Artificial Sequence
  Synthetic
gcacacagcuucccuggua

SEQ ID NO: 2874 - RNA, 19 nt, Artificial Sequence
  Synthetic
ggaguuaccuggagggcag

SEQ ID NO: 2875 - RNA, 19 nt, Artificial Sequence
  Synthetic
aggcaccacuggauguaua

SEQ ID NO: 2876 - RNA, 19 nt, Artificial Sequence
  Synthetic
gaacuguacuuacuaggaa

SEQ ID NO: 2877 - RNA, 19 nt, Artificial Sequence
  Synthetic
gcaucgugucucagaucaa

SEQ ID NO: 2878 - RNA, 19 nt, Artificial Sequence
  Synthetic
acaucuguccugugagcua

SEQ ID NO: 2879 - RNA, 19 nt, Artificial Sequence
  Synthetic
ggaauuaaaagacggauuu

SEQ ID NO: 2880 - RNA, 19 nt, Artificial Sequence
  Synthetic
caaauuugauagagaacug

SEQ ID NO: 2881 - RNA, 19 nt, Artificial Sequence
  Synthetic
caaacaaggucgacucgga

SEQ ID NO: 2882 - RNA, 19 nt, Artificial Sequence
  Synthetic
agcaagcacuacagaguca

SEQ ID NO: 2883 - RNA, 19 nt, Artificial Sequence
  Synthetic
ggacagcaaacaaggucga

SEQ ID NO: 2884 - RNA, 19 nt, Artificial Sequence
  Synthetic
caagaagagcuuugagaau

SEQ ID NO: 2885 - RNA, 19 nt, Artificial Sequence
  Synthetic
cuaccugccuggaggaaua

SEQ ID NO: 2886 - RNA, 19 nt, Artificial Sequence
  Synthetic
aggcaggagcaaagagcaa

SEQ ID NO: 2887 - RNA, 19 nt, Artificial Sequence
  Synthetic
acauugaguuugagagcau

SEQ ID NO: 2888 - RNA, 19 nt, Artificial Sequence
  Synthetic
augcaaucacuguggaaua

SEQ ID NO: 2889 - RNA, 19 nt, Artificial Sequence
  Synthetic
auuugaagaaccagagaaa

SEQ ID NO: 2890 - RNA, 19 nt, Artificial Sequence
  Synthetic
gggagagcauccaggaaga

SEQ ID NO: 2891 - RNA, 19 nt, Artificial Sequence
  Synthetic
guccggaaaugaaggaaua

SEQ ID NO: 2892 - RNA, 19 nt, Artificial Sequence
  Synthetic
agaagagcuuugagaauga

SEQ ID NO: 2893 - RNA, 19 nt, Artificial Sequence
  Synthetic
gggagaagcacaaggucuu

SEQ ID NO: 2894 - RNA, 19 nt, Artificial Sequence
  Synthetic
cuguagagggugagcgaga

SEQ ID NO: 2895 - RNA, 19 nt, Artificial Sequence
  Synthetic
ccaagaacagcuucaauaa

SEQ ID NO: 2896 - RNA, 19 nt, Artificial Sequence
  Synthetic
aggagggccuggugcauaa

SEQ ID NO: 2897 - RNA, 19 nt, Artificial Sequence
  Synthetic
aggaauacaagaagagcuu

SEQ ID NO: 2898 - RNA, 19 nt, Artificial Sequence
  Synthetic
ugucaggcauccagaagaa

SEQ ID NO: 2899 - RNA, 19 nt, Artificial Sequence
  Synthetic
ugucagugcuaaaggacuu

SEQ ID NO: 2900 - RNA, 19 nt, Artificial Sequence
  Synthetic
ccuuugaggugaagcuaga

SEQ ID NO: 2901 - RNA, 19 nt, Artificial Sequence
  Synthetic
gaacaugggaaguguacca

SEQ ID NO: 2902 - RNA, 19 nt, Artificial Sequence
  Synthetic
gaacuacaucagcaggaaa

SEQ ID NO: 2903 - RNA, 19 nt, Artificial Sequence
  Synthetic
ggagagcaccuuaauauua

SEQ ID NO: 2904 - RNA, 19 nt, Artificial Sequence
  Synthetic
ucacagaaguucacgcuga

SEQ ID NO: 2905 - RNA, 19 nt, Artificial Sequence
  Synthetic
ccaucggcuuggagcgcua

SEQ ID NO: 2906 - RNA, 19 nt, Artificial Sequence
  Synthetic
aagaaagggcucucaaaga

SEQ ID NO: 2907 - RNA, 19 nt, Artificial Sequence
  Synthetic
cccaagaacagcuucaaua

SEQ ID NO: 2908 - RNA, 19 nt, Artificial Sequence
  Synthetic
uguugcagcucaugaagaa

SEQ ID NO: 2909 - RNA, 19 nt, Artificial Sequence
  Synthetic
ccaagaaagggcucucaaa

SEQ ID NO: 2910 - RNA, 19 nt, Artificial Sequence
  Synthetic
ccaagaacaaaguggccau

SEQ ID NO: 2911 - RNA, 19 nt, Artificial Sequence
  Synthetic
gcaccaaguucuucaucga

SEQ ID NO: 2912 - RNA, 19 nt, Artificial Sequence
  Synthetic
acaagaagagcuuugagaa

SEQ ID NO: 2913 - RNA, 19 nt, Artificial Sequence
  Synthetic
uggaaauccuacccugaaa

SEQ ID NO: 2914 - RNA, 19 nt, Artificial Sequence
  Synthetic
aagaagaagugaaggaaca

SEQ ID NO: 2915 - RNA, 19 nt, Artificial Sequence
  Synthetic
uugaaaaucuggagggaaa

SEQ ID NO: 2916 - RNA, 19 nt, Artificial Sequence
  Synthetic
cugaguagcuugagucuua

SEQ ID NO: 2917 - RNA, 19 nt, Artificial Sequence
  Synthetic
cugaauaggaugaaccaua

SEQ ID NO: 2918 - RNA, 19 nt, Artificial Sequence
  Synthetic
gagcagaaauuguuugaau

SEQ ID NO: 2919 - RNA, 19 nt, Artificial Sequence
  Synthetic
cagaagugcccaagaggaa

SEQ ID NO: 2920 - RNA, 19 nt, Artificial Sequence
  Synthetic
gcuaagaagcugugcacau

SEQ ID NO: 2921 - RNA, 19 nt, Artificial Sequence
  Synthetic
cgagaaagagacuggcuaa

SEQ ID NO: 2922 - RNA, 19 nt, Artificial Sequence
  Synthetic
agguagagguggaaguaga

SEQ ID NO: 2923 - RNA, 19 nt, Artificial Sequence
  Synthetic
ggaaagacccagcugcaua

SEQ ID NO: 2924 - RNA, 19 nt, Artificial Sequence
  Synthetic
gcacuggagaggagaguuu

SEQ ID NO: 2925 - RNA, 19 nt, Artificial Sequence
  Synthetic
aagagaagauguaaagaga

SEQ ID NO: 2926 - RNA, 19 nt, Artificial Sequence
  Synthetic
aaguauuagaugugagcua

SEQ ID NO: 2927 - RNA, 19 nt, Artificial Sequence
  Synthetic
guggaaagauagaagaagu

SEQ ID NO: 2928 - RNA, 19 nt, Artificial Sequence
  Synthetic
gcuggagagggaagagaaa

SEQ ID NO: 2929 - RNA, 19 nt, Artificial Sequence
  Synthetic
agaaauaagcugugugucu

SEQ ID NO: 2930 - RNA, 19 nt, Artificial Sequence
  Synthetic
gaauaggagaaguagguuu

SEQ ID NO: 2931 - RNA, 19 nt, Artificial Sequence
  Synthetic
gagaggagaguuugaguau

SEQ ID NO: 2932 - RNA, 19 nt, Artificial Sequence
  Synthetic
gcagcaagguagaggugga

SEQ ID NO: 2933 - RNA, 19 nt, Artificial Sequence
  Synthetic
ggcuaagagaagauguaaa

SEQ ID NO: 2934 - RNA, 19 nt, Artificial Sequence
  Synthetic
gucaaauuccugagguuua

SEQ ID NO: 2935 - RNA, 19 nt, Artificial Sequence
  Synthetic
uggaagaagaagugaagga

SEQ ID NO: 2936 - RNA, 19 nt, Artificial Sequence
  Synthetic
uuugaauauuggugaggaa

SEQ ID NO: 2937 - RNA, 19 nt, Artificial Sequence
  Synthetic
caacaaagugaauggggua

SEQ ID NO: 2938 - RNA, 19 nt, Artificial Sequence
  Synthetic
guaaagagaggcuguguuu

SEQ ID NO: 2939 - RNA, 19 nt, Artificial Sequence
  Synthetic
cgcaaugggagcagaaauu

SEQ ID NO: 2940 - RNA, 19 nt, Artificial Sequence
  Synthetic
gaaagauagaagaagugaa

SEQ ID NO: 2941 - RNA, 19 nt, Artificial Sequence
  Synthetic
auaucaagcauguggauuu

SEQ ID NO: 2942 - RNA, 19 nt, Artificial Sequence
  Synthetic
gaucagaaaccuuugccaa

SEQ ID NO: 2943 - RNA, 19 nt, Artificial Sequence
  Synthetic
ugaaggaacaaaugaaaca

SEQ ID NO: 2944 - RNA, 19 nt, Artificial Sequence
  Synthetic
caacauaguucauggauuu

SEQ ID NO: 2945 - RNA, 19 nt, Artificial Sequence
  Synthetic
aguaguagcugaagagcaa

SEQ ID NO: 2946 - RNA, 19 nt, Artificial Sequence
  Synthetic
gcaacuguguuuugaauaa

SEQ ID NO: 2947 - RNA, 19 nt, Artificial Sequence
  Synthetic
gagaugaagaagaagauua

SEQ ID NO: 2948 - RNA, 19 nt, Artificial Sequence
  Synthetic
gauuugaucaggaggauaa

SEQ ID NO: 2949 - RNA, 19 nt, Artificial Sequence
  Synthetic
gaguauggcuaauguggaa

SEQ ID NO: 2950 - RNA, 19 nt, Artificial Sequence
  Synthetic
acauggagaugaagaagaa

SEQ ID NO: 2951 - RNA, 19 nt, Artificial Sequence
  Synthetic
aggaaaaccuuuagucuua

SEQ ID NO: 2952 - RNA, 19 nt, Artificial Sequence
  Synthetic
ugaagacgauggagaggaa

SEQ ID NO: 2953 - RNA, 19 nt, Artificial Sequence
  Synthetic
acaauugccuguugauaua

SEQ ID NO: 2954 - RNA, 19 nt, Artificial Sequence
  Synthetic
gcaacauaguucauggauu

SEQ ID NO: 2955 - RNA, 19 nt, Artificial Sequence
  Synthetic
ggaggaggugacagaguua

SEQ ID NO: 2956 - RNA, 19 nt, Artificial Sequence
  Synthetic
guaauaugguucauggauu

SEQ ID NO: 2957 - RNA, 19 nt, Artificial Sequence
  Synthetic
gauaauugccuguguguca

SEQ ID NO: 2958 - RNA, 19 nt, Artificial Sequence
  Synthetic
gaagaugacuggauggaaa

SEQ ID NO: 2959 - RNA, 19 nt, Artificial Sequence
  Synthetic
agggagagguggugaaaca

SEQ ID NO: 2960 - RNA, 19 nt, Artificial Sequence
  Synthetic
acacgaagguggcggugaa

SEQ ID NO: 2961 - RNA, 19 nt, Artificial Sequence
  Synthetic
ucaacaaacuccuggacau

SEQ ID NO: 2962 - RNA, 19 nt, Artificial Sequence
  Synthetic
gagagguggugaaacauua

SEQ ID NO: 2963 - RNA, 19 nt, Artificial Sequence
  Synthetic
ccuucaauuuuguggccaa

SEQ ID NO: 2964 - RNA, 19 nt, Artificial Sequence
  Synthetic
gcagugugcuggaggacuu

SEQ ID NO: 2965 - RNA, 19 nt, Artificial Sequence
  Synthetic
gggccaaguuucccauuaa

SEQ ID NO: 2966 - RNA, 19 nt, Artificial Sequence
  Synthetic
ccugagaccaccagagaga

SEQ ID NO: 2967 - RNA, 19 nt, Artificial Sequence
  Synthetic
gcacacaucaggaguucaa

SEQ ID NO: 2968 - RNA, 19 nt, Artificial Sequence
  Synthetic
caucaggaguucaauaaau

SEQ ID NO: 2969 - RNA, 19 nt, Artificial Sequence
  Synthetic
gaaugggagucuaguggau

SEQ ID NO: 2970 - RNA, 19 nt, Artificial Sequence
  Synthetic
ggacauggcagcccaaauu

SEQ ID NO: 2971 - RNA, 19 nt, Artificial Sequence
  Synthetic
gggagaagccugggauuga

SEQ ID NO: 2972 - RNA, 19 nt, Artificial Sequence
  Synthetic
ccacagagggccaguacca

SEQ ID NO: 2973 - RNA, 19 nt, Artificial Sequence
  Synthetic
cgccagaagccauuaacua

SEQ ID NO: 2974 - RNA, 19 nt, Artificial Sequence
  Synthetic
gcucacacccggaagauga

SEQ ID NO: 2975 - RNA, 19 nt, Artificial Sequence
  Synthetic
ucacugaauacauggagaa

SEQ ID NO: 2976 - RNA, 19 nt, Artificial Sequence
  Synthetic
gcacgcugcucauccgaaa

SEQ ID NO: 2977 - RNA, 19 nt, Artificial Sequence
  Synthetic
ugaccaacccggaggugau

SEQ ID NO: 2978 - RNA, 19 nt, Artificial Sequence
  Synthetic
aggccaaccucaugaagca

SEQ ID NO: 2979 - RNA, 19 nt, Artificial Sequence
  Synthetic
cugaauacauggagaaugg

SEQ ID NO: 2980 - RNA, 19 nt, Artificial Sequence
  Synthetic
ucacauggccuaugcacau

SEQ ID NO: 2981 - RNA, 19 nt, Artificial Sequence
  Synthetic
ccaacauucuggugucuga

SEQ ID NO: 2982 - RNA, 19 nt, Artificial Sequence
  Synthetic
cgacggagaucugggcuuu

SEQ ID NO: 2983 - RNA, 19 nt, Artificial Sequence
  Synthetic
ggacagcgccagaagccau

SEQ ID NO: 2984 - RNA, 19 nt, Artificial Sequence
  Synthetic
acacaucaggaguucaaua

SEQ ID NO: 2985 - RNA, 19 nt, Artificial Sequence
  Synthetic
auugaagagcggaauuaua

SEQ ID NO: 2986 - RNA, 19 nt, Artificial Sequence
  Synthetic
ccaaauugcagaaggcaug

SEQ ID NO: 2987 - RNA, 19 nt, Artificial Sequence
  Synthetic
ggccaggacuuuaucuaau

SEQ ID NO: 2988 - RNA, 19 nt, Artificial Sequence
  Synthetic
cauaagagcaggugaggua

SEQ ID NO: 2989 - RNA, 19 nt, Artificial Sequence
  Synthetic
ggccuaaacugaaaggaaa

SEQ ID NO: 2990 - RNA, 19 nt, Artificial Sequence
  Synthetic
aacucuaagucaaggguua

SEQ ID NO: 2991 - RNA, 19 nt, Artificial Sequence
  Synthetic
ucacacacuuugagagguu

SEQ ID NO: 2992 - RNA, 19 nt, Artificial Sequence
  Synthetic
acugaaaggaaaucaagaa

SEQ ID NO: 2993 - RNA, 19 nt, Artificial Sequence
  Synthetic
uugagagguugcagcagaa

SEQ ID NO: 2994 - RNA, 19 nt, Artificial Sequence
  Synthetic
cagcaagaucacacacuuu

SEQ ID NO: 2995 - RNA, 19 nt, Artificial Sequence
  Synthetic
cauuugaggccuaaacuga

SEQ ID NO: 2996 - RNA, 19 nt, Artificial Sequence
  Synthetic
ggccgaagcuggcagucuu

SEQ ID NO: 2997 - RNA, 19 nt, Artificial Sequence
  Synthetic
caggugcauuuguaauuua

SEQ ID NO: 2998 - RNA, 19 nt, Artificial Sequence
  Synthetic
uuugaggccuaaacugaaa

SEQ ID NO: 2999 - RNA, 19 nt, Artificial Sequence
  Synthetic
uauuguagacgucagcaaa

SEQ ID NO: 3000 - RNA, 19 nt, Artificial Sequence
  Synthetic
gcagcaagaucacacacuu

SEQ ID NO: 3001 - RNA, 19 nt, Artificial Sequence
  Synthetic
gaagaaggcaccaaugaaa

SEQ ID NO: 3002 - RNA, 19 nt, Artificial Sequence
  Synthetic
cagcagagcagaucaggaa

SEQ ID NO: 3003 - RNA, 19 nt, Artificial Sequence
  Synthetic
cugaaaggccagaaugaau

SEQ ID NO: 3004 - RNA, 19 nt, Artificial Sequence
  Synthetic
cagcauucccugaagaaga

SEQ ID NO: 3005 - RNA, 19 nt, Artificial Sequence
  Synthetic
caaaggaagcagagugugu

SEQ ID NO: 3006 - RNA, 19 nt, Artificial Sequence
  Synthetic
ccaaugaaagagaggagca

SEQ ID NO: 3007 - RNA, 19 nt, Artificial Sequence
  Synthetic
gagcagaucaggaaaagaa

SEQ ID NO: 3008 - RNA, 19 nt, Artificial Sequence
  Synthetic
gcagagcagaucaggaaaa

SEQ ID NO: 3009 - RNA, 19 nt, Artificial Sequence
  Synthetic
ccccagaaauagaugacaa

SEQ ID NO: 3010 - RNA, 19 nt, Artificial Sequence
  Synthetic
agaagaaggcaccaaugaa

SEQ ID NO: 3011 - RNA, 19 nt, Artificial Sequence
  Synthetic
cugaagaagaagaaggcac

SEQ ID NO: 3012 - RNA, 19 nt, Artificial Sequence
  Synthetic
aaagagaggagcagcggga

SEQ ID NO: 3013 - RNA, 19 nt, Artificial Sequence
  Synthetic
cugaagcagcagagcagau

SEQ ID NO: 3014 - RNA, 19 nt, Artificial Sequence
  Synthetic
aggagcagcgggaccauua

SEQ ID NO: 3015 - RNA, 19 nt, Artificial Sequence
  Synthetic
agaaggcaccaaugaaaga

SEQ ID NO: 3016 - RNA, 19 nt, Artificial Sequence
  Synthetic
agaagaagaaggcaccaau

SEQ ID NO: 3017 - RNA, 19 nt, Artificial Sequence
  Synthetic
aagaagaaggcaccaauga

SEQ ID NO: 3018 - RNA, 19 nt, Artificial Sequence
  Synthetic
ggguuaagcaucugaaagg

SEQ ID NO: 3019 - RNA, 19 nt, Artificial Sequence
  Synthetic
agcauucccugaagaagaa

SEQ ID NO: 3020 - RNA, 19 nt, Artificial Sequence
  Synthetic
caacacacaaggggaauua

SEQ ID NO: 3021 - RNA, 19 nt, Artificial Sequence
  Synthetic
guacacaccacccaccaua

SEQ ID NO: 3022 - RNA, 19 nt, Artificial Sequence
  Synthetic
cauaaaagggguuaagcau

SEQ ID NO: 3023 - RNA, 19 nt, Artificial Sequence
  Synthetic
ugaaaggccagaaugaauc

SEQ ID NO: 3024 - RNA, 19 nt, Artificial Sequence
  Synthetic
gaaaggccagaaugaauca

SEQ ID NO: 3025 - RNA, 19 nt, Artificial Sequence
  Synthetic
ggagcagcgggaccauuaa

SEQ ID NO: 3026 - RNA, 19 nt, Artificial Sequence
  Synthetic
acacaccacccaccauaaa

SEQ ID NO: 3027 - RNA, 19 nt, Artificial Sequence
  Synthetic
ccagaaauagaugacaaga

SEQ ID NO: 3028 - RNA, 19 nt, Artificial Sequence
  Synthetic
cacuugugauucucaauga

SEQ ID NO: 3029 - RNA, 19 nt, Artificial Sequence
  Synthetic
gaagaagaaggcaccaaug

SEQ ID NO: 3030 - RNA, 19 nt, Artificial Sequence
  Synthetic
gaagcagcagagcagauca

SEQ ID NO: 3031 - RNA, 19 nt, Artificial Sequence
  Synthetic
guaaauagcuguagaguca

SEQ ID NO: 3032 - RNA, 19 nt, Artificial Sequence
  Synthetic
ggauagaauuugagagagu

SEQ ID NO: 3033 - RNA, 19 nt, Artificial Sequence
  Synthetic
gugggaaacuacugggaua

SEQ ID NO: 3034 - RNA, 19 nt, Artificial Sequence
  Synthetic
gagcauaguuuuacaguca

SEQ ID NO: 3035 - RNA, 19 nt, Artificial Sequence
  Synthetic
gauaagugggccagaauua

SEQ ID NO: 3036 - RNA, 19 nt, Artificial Sequence
  Synthetic
guucagaaauagcagcaaa

SEQ ID NO: 3037 - RNA, 19 nt, Artificial Sequence
  Synthetic
ggagugagcuggugagguu

SEQ ID NO: 3038 - RNA, 19 nt, Artificial Sequence
  Synthetic
aggaaaugauacugaauga

SEQ ID NO: 3039 - RNA, 19 nt, Artificial Sequence
  Synthetic
caggauagaauuugagaga

SEQ ID NO: 3040 - RNA, 19 nt, Artificial Sequence
  Synthetic
ggucuuaggucuauaauca

SEQ ID NO: 3041 - RNA, 19 nt, Artificial Sequence
  Synthetic
gugaauagcauauguguca

SEQ ID NO: 3042 - RNA, 19 nt, Artificial Sequence
  Synthetic
uguaauaggcagcuguuaa

SEQ ID NO: 3043 - RNA, 19 nt, Artificial Sequence
  Synthetic
gcgugaacccauauugaua

SEQ ID NO: 3044 - RNA, 19 nt, Artificial Sequence
  Synthetic
uugagagagugaagaaauu

SEQ ID NO: 3045 - RNA, 19 nt, Artificial Sequence
  Synthetic
guaauaggcagcuguuaaa

SEQ ID NO: 3046 - RNA, 19 nt, Artificial Sequence
  Synthetic
ggacuacgagaaagacaaa

SEQ ID NO: 3047 - RNA, 19 nt, Artificial Sequence
  Synthetic
caacagauacccugauuuu

SEQ ID NO: 3048 - RNA, 19 nt, Artificial Sequence
  Synthetic
aacaguagaugaaggaaau

SEQ ID NO: 3049 - RNA, 19 nt, Artificial Sequence
  Synthetic
uaacagucaugguggugaa

SEQ ID NO: 3050 - RNA, 19 nt, Artificial Sequence
  Synthetic
caaguaagcuguuugcauu

SEQ ID NO: 3051 - RNA, 19 nt, Artificial Sequence
  Synthetic
gggauaagcuucuccuuga

SEQ ID NO: 3052 - RNA, 19 nt, Artificial Sequence
  Synthetic
gcagauuuggaaugguuua

SEQ ID NO: 3053 - RNA, 19 nt, Artificial Sequence
  Synthetic
agagagggcuagaccagaa

SEQ ID NO: 3054 - RNA, 19 nt, Artificial Sequence
  Synthetic
gcaaauauaucgagaacca

SEQ ID NO: 3055 - RNA, 19 nt, Artificial Sequence
  Synthetic
gaauuaacguccaguucaa

SEQ ID NO: 3056 - RNA, 19 nt, Artificial Sequence
  Synthetic
aguuugagcuccuggacua

SEQ ID NO: 3057 - RNA, 19 nt, Artificial Sequence
  Synthetic
gagacggaguggagagcga

SEQ ID NO: 3058 - RNA, 19 nt, Artificial Sequence
  Synthetic
cggcaaauauaucgagaac

SEQ ID NO: 3059 - RNA, 19 nt, Artificial Sequence
  Synthetic
auccagagguggugggaca

SEQ ID NO: 3060 - RNA, 19 nt, Artificial Sequence
  Synthetic
gcaugacgaccguggacaa

SEQ ID NO: 3061 - RNA, 19 nt, Artificial Sequence
  Synthetic
acaacaaggacauggacau

SEQ ID NO: 3062 - RNA, 19 nt, Artificial Sequence
  Synthetic
ggaaagaaggcaucgcaca

SEQ ID NO: 3063 - RNA, 19 nt, Artificial Sequence
  Synthetic
ggaacuacgaccaggaugu

SEQ ID NO: 3064 - RNA, 19 nt, Artificial Sequence
  Synthetic
aagaagggaggcuggagaa

SEQ ID NO: 3065 - RNA, 19 nt, Artificial Sequence
  Synthetic
gagcgaacaucgacacagu

SEQ ID NO: 3066 - RNA, 19 nt, Artificial Sequence
  Synthetic
gcuuugacaacaaggacau

SEQ ID NO: 3067 - RNA, 19 nt, Artificial Sequence
  Synthetic
acacagugauggcgugguu

SEQ ID NO: 3068 - RNA, 19 nt, Artificial Sequence
  Synthetic
agucagggcucccagaaca

SEQ ID NO: 3069 - RNA, 19 nt, Artificial Sequence
  Synthetic
cagaggaggaccuggaucu

SEQ ID NO: 3070 - RNA, 19 nt, Artificial Sequence
  Synthetic
ucuacaagaaggaggcguu

SEQ ID NO: 3071 - RNA, 19 nt, Artificial Sequence
  Synthetic
cuggcgaccugguugaauu

SEQ ID NO: 3072 - RNA, 19 nt, Artificial Sequence
  Synthetic
aagaaggcaucgcacacaa

SEQ ID NO: 3073 - RNA, 19 nt, Artificial Sequence
  Synthetic
gagcaccgguacaaaguca

SEQ ID NO: 3074 - RNA, 19 nt, Artificial Sequence
  Synthetic
gcgaacaucgacacaguga

SEQ ID NO: 3075 - RNA, 19 nt, Artificial Sequence
  Synthetic
ugguugaauuccacaaguu

SEQ ID NO: 3076 - RNA, 19 nt, Artificial Sequence
  Synthetic
ggaggcuggagaaggugua

SEQ ID NO: 3077 - RNA, 19 nt, Artificial Sequence
  Synthetic
ggagaauuaacguccaguu

SEQ ID NO: 3078 - RNA, 19 nt, Artificial Sequence
  Synthetic
aagggaggcuggagaaggu

SEQ ID NO: 3079 - RNA, 19 nt, Artificial Sequence
  Synthetic
ccgugauucuucugucuga

SEQ ID NO: 3080 - RNA, 19 nt, Artificial Sequence
  Synthetic
gcugugggcccuagcuuca

SEQ ID NO: 3081 - RNA, 19 nt, Artificial Sequence
  Synthetic
cgucauccaugggagaauu

SEQ ID NO: 3082 - RNA, 19 nt, Artificial Sequence
  Synthetic
gagaauuaacguccaguuc

SEQ ID NO: 3083 - RNA, 19 nt, Artificial Sequence
  Synthetic
ggaugcugcucccuaaaga

SEQ ID NO: 3084 - RNA, 19 nt, Artificial Sequence
  Synthetic
gagaaagagaggacagaaa

SEQ ID NO: 3085 - RNA, 19 nt, Artificial Sequence
  Synthetic
ugaagaagagggagagaaa

SEQ ID NO: 3086 - RNA, 19 nt, Artificial Sequence
  Synthetic
agaagaaggucaaggaaga

SEQ ID NO: 3087 - RNA, 19 nt, Artificial Sequence
  Synthetic
gauggaagaucaagagaau

SEQ ID NO: 3088 - RNA, 19 nt, Artificial Sequence
  Synthetic
ggucugaagaagagggaga

SEQ ID NO: 3089 - RNA, 19 nt, Artificial Sequence
  Synthetic
aggaagaaauggacgauga

SEQ ID NO: 3090 - RNA, 19 nt, Artificial Sequence
  Synthetic
gggaggaagaggaagaaau

SEQ ID NO: 3091 - RNA, 19 nt, Artificial Sequence
  Synthetic
aagaagagggagagaaaga

SEQ ID NO: 3092 - RNA, 19 nt, Artificial Sequence
  Synthetic
gcggaaaguugcagaagca

SEQ ID NO: 3093 - RNA, 19 nt, Artificial Sequence
  Synthetic
guguagagguggaugacuu

SEQ ID NO: 3094 - RNA, 19 nt, Artificial Sequence
  Synthetic
cuggaaagauggaagauca

SEQ ID NO: 3095 - RNA, 19 nt, Artificial Sequence
  Synthetic
acgaggaggaggaggagaa

SEQ ID NO: 3096 - RNA, 19 nt, Artificial Sequence
  Synthetic
cagcagagacaaagagguu

SEQ ID NO: 3097 - RNA, 19 nt, Artificial Sequence
  Synthetic
aggagagagaagaggacua

SEQ ID NO: 3098 - RNA, 19 nt, Artificial Sequence
  Synthetic
gcaaauggcaacucuguaa

SEQ ID NO: 3099 - RNA, 19 nt, Artificial Sequence
  Synthetic
cgucugaguuccuggauga

SEQ ID NO: 3100 - RNA, 19 nt, Artificial Sequence
  Synthetic
ggaugacgccugagccaaa

SEQ ID NO: 3101 - RNA, 19 nt, Artificial Sequence
  Synthetic
gggagaagaugucugagua

SEQ ID NO: 3102 - RNA, 19 nt, Artificial Sequence
  Synthetic
ggggaagggaggaggagaa

SEQ ID NO: 3103 - RNA, 19 nt, Artificial Sequence
  Synthetic
ggucaaggaagaugaggau

SEQ ID NO: 3104 - RNA, 19 nt, Artificial Sequence
  Synthetic
ucaagaagaagaaggucaa

SEQ ID NO: 3105 - RNA, 19 nt, Artificial Sequence
  Synthetic
ucaaggaagaugaggauga

SEQ ID NO: 3106 - RNA, 19 nt, Artificial Sequence
  Synthetic
agaaggaggaggagagcga

SEQ ID NO: 3107 - RNA, 19 nt, Artificial Sequence
  Synthetic
ccgcaguaauucccagaaa

SEQ ID NO: 3108 - RNA, 19 nt, Artificial Sequence
  Synthetic
gcucagaagcaaaaugaaa

SEQ ID NO: 3109 - RNA, 19 nt, Artificial Sequence
  Synthetic
ggucucagaugcagaaaca

SEQ ID NO: 3110 - RNA, 19 nt, Artificial Sequence
  Synthetic
cugacaauguggaccuaaa

SEQ ID NO: 3111 - RNA, 19 nt, Artificial Sequence
  Synthetic
gcacugacagggaggaaga

SEQ ID NO: 3112 - RNA, 19 nt, Artificial Sequence
  Synthetic
acgaggacguggagaggau

SEQ ID NO: 3113 - RNA, 19 nt, Artificial Sequence
  Synthetic
gcgaggaggacgaagccaa

SEQ ID NO: 3114 - RNA, 19 nt, Artificial Sequence
  Synthetic
uuuaauaggaggaggaauu

SEQ ID NO: 3115 - RNA, 19 nt, Artificial Sequence
  Synthetic
uggaauaaucugcgggcua

SEQ ID NO: 3116 - RNA, 19 nt, Artificial Sequence
  Synthetic
gguuaaaagcugcugaaaa

SEQ ID NO: 3117 - RNA, 19 nt, Artificial Sequence
  Synthetic
aggagaggccaaagggcaa

SEQ ID NO: 3118 - RNA, 19 nt, Artificial Sequence
  Synthetic
cccgaaaacacuagaaaua

SEQ ID NO: 3119 - RNA, 19 nt, Artificial Sequence
  Synthetic
ccaccaugguccuggcaau

SEQ ID NO: 3120 - RNA, 19 nt, Artificial Sequence
  Synthetic
ccaguagagggcagcgaaa

SEQ ID NO: 3121 - RNA, 19 nt, Artificial Sequence
  Synthetic
gggucggacuagagcccaa

SEQ ID NO: 3122 - RNA, 19 nt, Artificial Sequence
  Synthetic
ccucacaguuggugcacau

SEQ ID NO: 3123 - RNA, 19 nt, Artificial Sequence
  Synthetic
gauuaugguaggagaagga

SEQ ID NO: 3124 - RNA, 19 nt, Artificial Sequence
  Synthetic
gaauaagaaugaaagucga

SEQ ID NO: 3125 - RNA, 19 nt, Artificial Sequence
  Synthetic
ccuacauuguggaagauau

SEQ ID NO: 3126 - RNA, 19 nt, Artificial Sequence
  Synthetic
aguagagggcagcgaaauu

SEQ ID NO: 3127 - RNA, 19 nt, Artificial Sequence
  Synthetic
cuacauuguggaagauauu

SEQ ID NO: 3128 - RNA, 19 nt, Artificial Sequence
  Synthetic
gggacuuguuugaaagaaa

SEQ ID NO: 3129 - RNA, 19 nt, Artificial Sequence
  Synthetic
ccacagagaacgaggauga

SEQ ID NO: 3130 - RNA, 19 nt, Artificial Sequence
  Synthetic
cagcagaaauggaagaaaa

SEQ ID NO: 3131 - RNA, 19 nt, Artificial Sequence
  Synthetic
gggauuacaagguuaaaua

SEQ ID NO: 3132 - RNA, 19 nt, Artificial Sequence
  Synthetic
guacaaggcccuagaggca

SEQ ID NO: 3133 - RNA, 19 nt, Artificial Sequence
  Synthetic
ggagcuugcugcagaguga

SEQ ID NO: 3134 - RNA, 19 nt, Artificial Sequence
  Synthetic
ggaagcaggccgagagacu

SEQ ID NO: 3135 - RNA, 19 nt, Artificial Sequence
  Synthetic
aaauauggcuacacggaca

SEQ ID NO: 3136 - RNA, 19 nt, Artificial Sequence
  Synthetic
agaagauccuugagagacu

SEQ ID NO: 3137 - RNA, 19 nt, Artificial Sequence
  Synthetic
gaugauugacacugaguuu

SEQ ID NO: 3138 - RNA, 19 nt, Artificial Sequence
  Synthetic
ucagaagauccuugagaga

SEQ ID NO: 3139 - RNA, 19 nt, Artificial Sequence
  Synthetic
cacaaaggcuugggaacaa

SEQ ID NO: 3140 - RNA, 19 nt, Artificial Sequence
  Synthetic
gugagaggauuuaaaguca

SEQ ID NO: 3141 - RNA, 19 nt, Artificial Sequence
  Synthetic
gaaagaaagaggaguugga

SEQ ID NO: 3142 - RNA, 19 nt, Artificial Sequence
  Synthetic
ucacaaaggcuugggaaca

SEQ ID NO: 3143 - RNA, 19 nt, Artificial Sequence
  Synthetic
cgcaauugccagagggagu

SEQ ID NO: 3144 - RNA, 19 nt, Artificial Sequence
  Synthetic
aaccaaagcccgaccuuaa

SEQ ID NO: 3145 - RNA, 19 nt, Artificial Sequence
  Synthetic
ccacagcagaaauggaaga

SEQ ID NO: 3146 - RNA, 19 nt, Artificial Sequence
  Synthetic
gcccagagcaccagcaaga

SEQ ID NO: 3147 - RNA, 19 nt, Artificial Sequence
  Synthetic
guggauggguugcagguga

SEQ ID NO: 3148 - RNA, 19 nt, Artificial Sequence
  Synthetic
ugacccugcuagugaggaa

SEQ ID NO: 3149 - RNA, 19 nt, Artificial Sequence
  Synthetic
aagacguuagagagggaaa

SEQ ID NO: 3150 - RNA, 19 nt, Artificial Sequence
  Synthetic
gcaagggcacugagagcca

SEQ ID NO: 3151 - RNA, 19 nt, Artificial Sequence
  Synthetic
ggccugaguuagacuauuu

SEQ ID NO: 3152 - RNA, 19 nt, Artificial Sequence
  Synthetic
gcaggugagaggauuuaaa

SEQ ID NO: 3153 - RNA, 19 nt, Artificial Sequence
  Synthetic
ucaagacguuagagaggga

SEQ ID NO: 3154 - RNA, 19 nt, Artificial Sequence
  Synthetic
agaacgaggaugagcucuu

SEQ ID NO: 3155 - RNA, 19 nt, Artificial Sequence
  Synthetic
ggauuuaaagucagucaca

SEQ ID NO: 3156 - RNA, 19 nt, Artificial Sequence
  Synthetic
acaaaggcuugggaacaaa

SEQ ID NO: 3157 - RNA, 19 nt, Artificial Sequence
  Synthetic
ucgcagagccagaaaucca

SEQ ID NO: 3158 - RNA, 19 nt, Artificial Sequence
  Synthetic
gcgaagagauggugugaaa

SEQ ID NO: 3159 - RNA, 19 nt, Artificial Sequence
  Synthetic
ggaagaugguccugggauu

SEQ ID NO: 3160 - RNA, 19 nt, Artificial Sequence
  Synthetic
gugcagaaagucagggaua

SEQ ID NO: 3161 - RNA, 19 nt, Artificial Sequence
  Synthetic
gguguagaguugugugaaa

SEQ ID NO: 3162 - RNA, 19 nt, Artificial Sequence
  Synthetic
ccaagcgucucgaggauaa

SEQ ID NO: 3163 - RNA, 19 nt, Artificial Sequence
  Synthetic
ggagguagcuagcguguga

SEQ ID NO: 3164 - RNA, 19 nt, Artificial Sequence
  Synthetic
uugcagaaccagacagaga

SEQ ID NO: 3165 - RNA, 19 nt, Artificial Sequence
  Synthetic
ccaucaagaaagucaaaga

SEQ ID NO: 3166 - RNA, 19 nt, Artificial Sequence
  Synthetic
gagaccaggacauggcuaa

SEQ ID NO: 3167 - RNA, 19 nt, Artificial Sequence
  Synthetic
gguaacuggcuuugggcuu

SEQ ID NO: 3168 - RNA, 19 nt, Artificial Sequence
  Synthetic
ucaagaaagucaaagacca

SEQ ID NO: 3169 - RNA, 19 nt, Artificial Sequence
  Synthetic
augcaaugguguagaguug

SEQ ID NO: 3170 - RNA, 19 nt, Artificial Sequence
  Synthetic
cguggaggccaucaagaaa

SEQ ID NO: 3171 - RNA, 19 nt, Artificial Sequence
  Synthetic
ugaaauugucacucgcuua

SEQ ID NO: 3172 - RNA, 19 nt, Artificial Sequence
  Synthetic
agacagacagcgaagagau

SEQ ID NO: 3173 - RNA, 19 nt, Artificial Sequence
  Synthetic
ggaagauccuggugcauug

SEQ ID NO: 3174 - RNA, 19 nt, Artificial Sequence
  Synthetic
cggaguagcucaaggucuc

SEQ ID NO: 3175 - RNA, 19 nt, Artificial Sequence
  Synthetic
acgugugugucauggcuua

SEQ ID NO: 3176 - RNA, 19 nt, Artificial Sequence
  Synthetic
gugcauggcuggcagucuu

SEQ ID NO: 3177 - RNA, 19 nt, Artificial Sequence
  Synthetic
gagggaagauccuggugca

SEQ ID NO: 3178 - RNA, 19 nt, Artificial Sequence
  Synthetic
gcgcacacgcugauuugaa

SEQ ID NO: 3179 - RNA, 19 nt, Artificial Sequence
  Synthetic
ggcuggcagucuugaaauu

SEQ ID NO: 3180 - RNA, 19 nt, Artificial Sequence
  Synthetic
uggccuaccucaugcugua

SEQ ID NO: 3181 - RNA, 19 nt, Artificial Sequence
  Synthetic
ucucgaggauaaauaaaga

SEQ ID NO: 3182 - RNA, 19 nt, Artificial Sequence
  Synthetic
gcacaggaggagguagcua

SEQ ID NO: 3183 - RNA, 19 nt, Artificial Sequence
  Synthetic
ggauacggcaagcaugaau

SEQ ID NO: 3184 - RNA, 19 nt, Artificial Sequence
  Synthetic
gggaagauccuggugcauu

SEQ ID NO: 3185 - RNA, 19 nt, Artificial Sequence
  Synthetic
ccucaaugucuucgaguug

SEQ ID NO: 3186 - RNA, 19 nt, Artificial Sequence
  Synthetic
ggccaucaagaaagucaaa

SEQ ID NO: 3187 - RNA, 19 nt, Artificial Sequence
  Synthetic
gcagcuaccuggcaacuga

SEQ ID NO: 3188 - RNA, 19 nt, Artificial Sequence
  Synthetic
gauuuuggauguugggaaa

SEQ ID NO: 3189 - RNA, 19 nt, Artificial Sequence
  Synthetic
guaaaugcccugacgaaua

SEQ ID NO: 3190 - RNA, 19 nt, Artificial Sequence
  Synthetic
cgggaaauuucgcuggaua

SEQ ID NO: 3191 - RNA, 19 nt, Artificial Sequence
  Synthetic
cugaaagcguggagacaga

SEQ ID NO: 3192 - RNA, 19 nt, Artificial Sequence
  Synthetic
aagcaaagccagucaagaa

SEQ ID NO: 3193 - RNA, 19 nt, Artificial Sequence
  Synthetic
ugacgaauauaaagaggua

SEQ ID NO: 3194 - RNA, 19 nt, Artificial Sequence
  Synthetic
acagaaagcuuguauauga

SEQ ID NO: 3195 - RNA, 19 nt, Artificial Sequence
  Synthetic
cagaauugcuuccacguaa

SEQ ID NO: 3196 - RNA, 19 nt, Artificial Sequence
  Synthetic
gcaaagcguuccugcagaa

SEQ ID NO: 3197 - RNA, 19 nt, Artificial Sequence
  Synthetic
uugaagagcccaaggugaa

SEQ ID NO: 3198 - RNA, 19 nt, Artificial Sequence
  Synthetic
gaauaggccuuuaaacuuu

SEQ ID NO: 3199 - RNA, 19 nt, Artificial Sequence
  Synthetic
gauguuaucucuagguuuu

SEQ ID NO: 3200 - RNA, 19 nt, Artificial Sequence
  Synthetic
gguuagaugugacuggauu

SEQ ID NO: 3201 - RNA, 19 nt, Artificial Sequence
  Synthetic
gcacauuuccuguaagcau

SEQ ID NO: 3202 - RNA, 19 nt, Artificial Sequence
  Synthetic
aaacccagcuccagaauuu

SEQ ID NO: 3203 - RNA, 19 nt, Artificial Sequence
  Synthetic
gaauguggaucuacaguca

SEQ ID NO: 3204 - RNA, 19 nt, Artificial Sequence
  Synthetic
uaaucuguguggaggguuu

SEQ ID NO: 3205 - RNA, 19 nt, Artificial Sequence
  Synthetic
agaauugcuuccacguaaa

SEQ ID NO: 3206 - RNA, 19 nt, Artificial Sequence
  Synthetic
gaccagaacugaaggaaga

SEQ ID NO: 3207 - RNA, 19 nt, Artificial Sequence
  Synthetic
agacacacacacagaaaua

SEQ ID NO: 3208 - RNA, 19 nt, Artificial Sequence
  Synthetic
uuacagugcugcagagauu

SEQ ID NO: 3209 - RNA, 19 nt, Artificial Sequence
  Synthetic
cagauauuguugcaagaua

SEQ ID NO: 3210 - RNA, 19 nt, Artificial Sequence
  Synthetic
gcaaacaagucauuagcau

SEQ ID NO: 3211 - RNA, 19 nt, Artificial Sequence
  Synthetic
cugaaaaggcgaagacaau

SEQ ID NO: 3212 - RNA, 19 nt, Artificial Sequence
  Synthetic
gcaaugguuuacagauauu

SEQ ID NO: 3213 - RNA, 19 nt, Artificial Sequence
  Synthetic
ucagaagaauugaggaucu

SEQ ID NO: 3214 - RNA, 19 nt, Artificial Sequence
  Synthetic
caaacaagucauuagcauu

SEQ ID NO: 3215 - RNA, 19 nt, Artificial Sequence
  Synthetic
gaugcuacaugguuauaua

SEQ ID NO: 3216 - RNA, 19 nt, Artificial Sequence
  Synthetic
agaagcagcauauagaaua

SEQ ID NO: 3217 - RNA, 19 nt, Artificial Sequence
  Synthetic
ccaacagaaacuggagaaa

SEQ ID NO: 3218 - RNA, 19 nt, Artificial Sequence
  Synthetic
cagcauagauaaugaacuc

SEQ ID NO: 3219 - RNA, 19 nt, Artificial Sequence
  Synthetic
guuggaugcuacaugguua

SEQ ID NO: 3220 - RNA, 19 nt, Artificial Sequence
  Synthetic
uggaagauguugcaaguca

SEQ ID NO: 3221 - RNA, 19 nt, Artificial Sequence
  Synthetic
acagauggcucaugcuauu

SEQ ID NO: 3222 - RNA, 19 nt, Artificial Sequence
  Synthetic
gcuguugcauguuguaaua

SEQ ID NO: 3223 - RNA, 19 nt, Artificial Sequence
  Synthetic
gagaccauugcguggguaa

SEQ ID NO: 3224 - RNA, 19 nt, Artificial Sequence
  Synthetic
ggagaauggacaacacaga

SEQ ID NO: 3225 - RNA, 19 nt, Artificial Sequence
  Synthetic
ccugaaaaggcgaagacaa

SEQ ID NO: 3226 - RNA, 19 nt, Artificial Sequence
  Synthetic
gucaaaagauuucuggaua

SEQ ID NO: 3227 - RNA, 19 nt, Artificial Sequence
  Synthetic
aggcaaugcaguauggcuu

SEQ ID NO: 3228 - RNA, 19 nt, Artificial Sequence
  Synthetic
gauaauaccagaccgauuu

SEQ ID NO: 3229 - RNA, 19 nt, Artificial Sequence
  Synthetic
gcaagcaaauguaccaaga

SEQ ID NO: 3230 - RNA, 19 nt, Artificial Sequence
  Synthetic
ggguauuccaacagaaacu

SEQ ID NO: 3231 - RNA, 19 nt, Artificial Sequence
  Synthetic
gcuggaagauguugcaagu

SEQ ID NO: 3232 - RNA, 19 nt, Artificial Sequence
  Synthetic
gcauagaauuccaaagaaa

SEQ ID NO: 3233 - RNA, 19 nt, Artificial Sequence
  Synthetic
gaagaaucccuaagagaua

SEQ ID NO: 3234 - RNA, 19 nt, Artificial Sequence
  Synthetic
ccagaaaggacguaacuua

SEQ ID NO: 3235 - RNA, 19 nt, Artificial Sequence
  Synthetic
caagagaggcauaaacuua

SEQ ID NO: 3236 - RNA, 19 nt, Artificial Sequence
  Synthetic
aaucaugaauccugguaaa

SEQ ID NO: 3237 - RNA, 19 nt, Artificial Sequence
  Synthetic
ucagagaggugaugcacua

SEQ ID NO: 3238 - RNA, 19 nt, Artificial Sequence
  Synthetic
gcaaaggaucacugcuuaa

SEQ ID NO: 3239 - RNA, 19 nt, Artificial Sequence
  Synthetic
gccaggaguuccagacuaa

SEQ ID NO: 3240 - RNA, 19 nt, Artificial Sequence
  Synthetic
gcauaaacuuagacacagu

SEQ ID NO: 3241 - RNA, 19 nt, Artificial Sequence
  Synthetic
ggccuuauaugguguguua

SEQ ID NO: 3242 - RNA, 19 nt, Artificial Sequence
  Synthetic
ccacugagccugaguugaa

SEQ ID NO: 3243 - RNA, 19 nt, Artificial Sequence
  Synthetic
caugaauccugguaaacaa

SEQ ID NO: 3244 - RNA, 19 nt, Artificial Sequence
  Synthetic
cugaauaaaugacugagaa

SEQ ID NO: 3245 - RNA, 19 nt, Artificial Sequence
  Synthetic
gagaauggagagagcauga

SEQ ID NO: 3246 - RNA, 19 nt, Artificial Sequence
  Synthetic
ggaagaaucccuaagagau

SEQ ID NO: 3247 - RNA, 19 nt, Artificial Sequence
  Synthetic
ugauugagcugaauaagua

SEQ ID NO: 3248 - RNA, 19 nt, Artificial Sequence
  Synthetic
gaccuaaguucuuuugaua

SEQ ID NO: 3249 - RNA, 19 nt, Artificial Sequence
  Synthetic
gagccugaguugaaauauu

SEQ ID NO: 3250 - RNA, 19 nt, Artificial Sequence
  Synthetic
gcaaaggcuuccucagaca

SEQ ID NO: 3251 - RNA, 19 nt, Artificial Sequence
  Synthetic
cuaaggagguggagaguaa

SEQ ID NO: 3252 - RNA, 19 nt, Artificial Sequence
  Synthetic
ggacagaaauacugaagaa

SEQ ID NO: 3253 - RNA, 19 nt, Artificial Sequence
  Synthetic
cagaaauacugaagaacua

SEQ ID NO: 3254 - RNA, 19 nt, Artificial Sequence
  Synthetic
cagaagaccuccaugaaua

SEQ ID NO: 3255 - RNA, 19 nt, Artificial Sequence
  Synthetic
gguuaaagaagaugggaca

SEQ ID NO: 3256 - RNA, 19 nt, Artificial Sequence
  Synthetic
cagcagaauugcaauguua

SEQ ID NO: 3257 - RNA, 19 nt, Artificial Sequence
  Synthetic
aagaauaauaggaggaaga

SEQ ID NO: 3258 - RNA, 19 nt, Artificial Sequence
  Synthetic
gaggacagcuggagggaca

SEQ ID NO: 3259 - RNA, 19 nt, Artificial Sequence
  Synthetic
cauuaaugagggagaguau

SEQ ID NO: 3260 - RNA, 19 nt, Artificial Sequence
  Synthetic
guacugcaaugaagagaua

SEQ ID NO: 3261 - RNA, 19 nt, Artificial Sequence
  Synthetic
ccaaagaagucaauaaacu

SEQ ID NO: 3262 - RNA, 19 nt, Artificial Sequence
  Synthetic
gcaaagaaggagcaaguuu

SEQ ID NO: 3263 - RNA, 19 nt, Artificial Sequence
  Synthetic
caaggaggcuggagcagaa

SEQ ID NO: 3264 - RNA, 19 nt, Artificial Sequence
  Synthetic
gaaauaacccagaugaaga

SEQ ID NO: 3265 - RNA, 19 nt, Artificial Sequence
  Synthetic
cacaagaccaggacagaaa

SEQ ID NO: 3266 - RNA, 19 nt, Artificial Sequence
  Synthetic
cugaguacaucaauggaua

SEQ ID NO: 3267 - RNA, 19 nt, Artificial Sequence
  Synthetic
gcagacagcucauggccaa

SEQ ID NO: 3268 - RNA, 19 nt, Artificial Sequence
  Synthetic
guuccaaagaagucaauaa

SEQ ID NO: 3269 - RNA, 19 nt, Artificial Sequence
  Synthetic
cuacagacauccugagcuu

SEQ ID NO: 3270 - RNA, 19 nt, Artificial Sequence
  Synthetic
agaaagaagugucugucua

SEQ ID NO: 3271 - RNA, 19 nt, Artificial Sequence
  Synthetic
ccaagaaagggaugaauca

SEQ ID NO: 3272 - RNA, 19 nt, Artificial Sequence
  Synthetic
ggaacugguuaaagaagau

SEQ ID NO: 3273 - RNA, 19 nt, Artificial Sequence
  Synthetic
ugacaaggcaccaguuuua

SEQ ID NO: 3274 - RNA, 19 nt, Artificial Sequence
  Synthetic
agaaaucagugcuggugaa

SEQ ID NO: 3275 - RNA, 19 nt, Artificial Sequence
  Synthetic
caugagacuuggaagauau

SEQ ID NO: 3276 - RNA, 19 nt, Artificial Sequence
  Synthetic
cgggaucgguugugaccaa

SEQ ID NO: 3277 - RNA, 19 nt, Artificial Sequence
  Synthetic
gaaaaggaugugaggcaaa

SEQ ID NO: 3278 - RNA, 19 nt, Artificial Sequence
  Synthetic
uauuauaccuggaggacca

SEQ ID NO: 3279 - RNA, 19 nt, Artificial Sequence
  Synthetic
gcagguggauggagugauu

SEQ ID NO: 3280 - RNA, 19 nt, Artificial Sequence
  Synthetic
gggccaaaacagagagaga

SEQ ID NO: 3281 - RNA, 19 nt, Artificial Sequence
  Synthetic
gaugaugagaggcggaaua

SEQ ID NO: 3282 - RNA, 19 nt, Artificial Sequence
  Synthetic
gcuucaaggacaagugaga

SEQ ID NO: 3283 - RNA, 19 nt, Artificial Sequence
  Synthetic
gucaaggguuagagacauu

SEQ ID NO: 3284 - RNA, 19 nt, Artificial Sequence
  Synthetic
ucuucaaacucuaagucaa

SEQ ID NO: 3285 - RNA, 19 nt, Artificial Sequence
  Synthetic
gguuagagacauuugcgaa

SEQ ID NO: 3286 - RNA, 19 nt, Artificial Sequence
  Synthetic
aagucaaggguuagagaca

SEQ ID NO: 3287 - RNA, 19 nt, Artificial Sequence
  Synthetic
uucaaggacaagugagaua

SEQ ID NO: 3288 - RNA, 19 nt, Artificial Sequence
  Synthetic
guacuuuguucaucgggaa

SEQ ID NO: 3289 - RNA, 19 nt, Artificial Sequence
  Synthetic
cagucuuugauuuggauua

SEQ ID NO: 3290 - RNA, 19 nt, Artificial Sequence
  Synthetic
gcggcugcuucaaggacaa

SEQ ID NO: 3291 - RNA, 19 nt, Artificial Sequence
  Synthetic
gauggaacuguacgagaua

SEQ ID NO: 3292 - RNA, 19 nt, Artificial Sequence
  Synthetic
ugauggaacuguacgagau

SEQ ID NO: 3293 - RNA, 19 nt, Artificial Sequence
  Synthetic
gcagcagaagacuggaauu

SEQ ID NO: 3294 - RNA, 19 nt, Artificial Sequence
  Synthetic
cgggaaaucuauccaggca

SEQ ID NO: 3295 - RNA, 19 nt, Artificial Sequence
  Synthetic
cauaagagcagugauggaa

SEQ ID NO: 3296 - RNA, 19 nt, Artificial Sequence
  Synthetic
gcagaagacuggaauuccu

SEQ ID NO: 3297 - RNA, 19 nt, Artificial Sequence
  Synthetic
gaugagaggcggaauauug

SEQ ID NO: 3298 - RNA, 19 nt, Artificial Sequence
  Synthetic
cugcaaauguuuacagaaa

SEQ ID NO: 3299 - RNA, 19 nt, Artificial Sequence
  Synthetic
gcaacaagucagauaguua

SEQ ID NO: 3300 - RNA, 19 nt, Artificial Sequence
  Synthetic
ggauauggguauacuauua

SEQ ID NO: 3301 - RNA, 19 nt, Artificial Sequence
  Synthetic
cagugaagaaugugaauua

SEQ ID NO: 3302 - RNA, 19 nt, Artificial Sequence
  Synthetic
cgugaaaguauuugcuaua

SEQ ID NO: 3303 - RNA, 19 nt, Artificial Sequence
  Synthetic
gaaaagaggauauggguau

SEQ ID NO: 3304 - RNA, 19 nt, Artificial Sequence
  Synthetic
aaacaaaggucucagccaa

SEQ ID NO: 3305 - RNA, 19 nt, Artificial Sequence
  Synthetic
caaagcaguugaacagaaa

SEQ ID NO: 3306 - RNA, 19 nt, Artificial Sequence
  Synthetic
gcaccuuguuucaggauau

SEQ ID NO: 3307 - RNA, 19 nt, Artificial Sequence
  Synthetic
gaccagaaaugcagaacau

SEQ ID NO: 3308 - RNA, 19 nt, Artificial Sequence
  Synthetic
ggacaaagcaguugaacag

SEQ ID NO: 3309 - RNA, 19 nt, Artificial Sequence
  Synthetic
gaaaagugcuggaguaaca

SEQ ID NO: 3310 - RNA, 19 nt, Artificial Sequence
  Synthetic
cagaugagaauuugaaaca

SEQ ID NO: 3311 - RNA, 19 nt, Artificial Sequence
  Synthetic
ucuaggaacuuuacagauu

SEQ ID NO: 3312 - RNA, 19 nt, Artificial Sequence
  Synthetic
cauagaugaugcaaaggua

SEQ ID NO: 3313 - RNA, 19 nt, Artificial Sequence
  Synthetic
gaaacaagaaacagagugu

SEQ ID NO: 3314 - RNA, 19 nt, Artificial Sequence
  Synthetic
gugcuuuaccacugugaaa

SEQ ID NO: 3315 - RNA, 19 nt, Artificial Sequence
  Synthetic
acaaagcaguugaacagaa

SEQ ID NO: 3316 - RNA, 19 nt, Artificial Sequence
  Synthetic
gcaguugaacagaaacaaa

SEQ ID NO: 3317 - RNA, 19 nt, Artificial Sequence
  Synthetic
uugucaaaccagugaagaa

SEQ ID NO: 3318 - RNA, 19 nt, Artificial Sequence
  Synthetic
augaagaucugaagaacca

SEQ ID NO: 3319 - RNA, 19 nt, Artificial Sequence
  Synthetic
aaucaggaauauuguggua

SEQ ID NO: 3320 - RNA, 19 nt, Artificial Sequence
  Synthetic
gcaaauguuuacagaaaug

SEQ ID NO: 3321 - RNA, 19 nt, Artificial Sequence
  Synthetic
ggaaaagaggauaugggua

SEQ ID NO: 3322 - RNA, 19 nt, Artificial Sequence
  Synthetic
uguaaauaguucugaguuc

SEQ ID NO: 3323 - RNA, 19 nt, Artificial Sequence
  Synthetic
ugacauagaugaugcaaag

SEQ ID NO: 3324 - RNA, 19 nt, Artificial Sequence
  Synthetic
ucagauaguuagaaucgaa

SEQ ID NO: 3325 - RNA, 19 nt, Artificial Sequence
  Synthetic
cauuugaccuggcaauuaa

SEQ ID NO: 3326 - RNA, 19 nt, Artificial Sequence
  Synthetic
ucaaaugccgugaaaguau

SEQ ID NO: 3327 - RNA, 19 nt, Artificial Sequence
  Synthetic
uaggacagcucuagcauuu

SEQ ID NO: 3328 - RNA, 19 nt, Artificial Sequence
  Synthetic
gggaaugggaugaacaaga

SEQ ID NO: 3329 - RNA, 19 nt, Artificial Sequence
  Synthetic
ggcaguggcugaaggaaga

SEQ ID NO: 3330 - RNA, 19 nt, Artificial Sequence
  Synthetic
guuaauaaagggcaacuua

SEQ ID NO: 3331 - RNA, 19 nt, Artificial Sequence
  Synthetic
cggcaaggcgggaccauuu

SEQ ID NO: 3332 - RNA, 19 nt, Artificial Sequence
  Synthetic
gcaacauagaguuuaagua

SEQ ID NO: 3333 - RNA, 19 nt, Artificial Sequence
  Synthetic
ggaugcagaagaagccaaa

SEQ ID NO: 3334 - RNA, 19 nt, Artificial Sequence
  Synthetic
agaacaaggugacacauau

SEQ ID NO: 3335 - RNA, 19 nt, Artificial Sequence
  Synthetic
gugguggaauugaccgaaa

SEQ ID NO: 3336 - RNA, 19 nt, Artificial Sequence
  Synthetic
gaaaagcaacauagaguuu

SEQ ID NO: 3337 - RNA, 19 nt, Artificial Sequence
  Synthetic
ggaaugggaugaacaagau

SEQ ID NO: 3338 - RNA, 19 nt, Artificial Sequence
  Synthetic
uguuggagggaguuaaaua

SEQ ID NO: 3339 - RNA, 19 nt, Artificial Sequence
  Synthetic
gacaagacauuucaaagaa

SEQ ID NO: 3340 - RNA, 19 nt, Artificial Sequence
  Synthetic
gcaugagguccaucaguau

SEQ ID NO: 3341 - RNA, 19 nt, Artificial Sequence
  Synthetic
guugagaacuaaggauauu

SEQ ID NO: 3342 - RNA, 19 nt, Artificial Sequence
  Synthetic
accgaaagcucuauguuuu

SEQ ID NO: 3343 - RNA, 19 nt, Artificial Sequence
  Synthetic
caacagagcuuuacaacau

SEQ ID NO: 3344 - RNA, 19 nt, Artificial Sequence
  Synthetic
gcaaagaucuugugccuca

SEQ ID NO: 3345 - RNA, 19 nt, Artificial Sequence
  Synthetic
ccacaaaacucuccagauu

SEQ ID NO: 3346 - RNA, 19 nt, Artificial Sequence
  Synthetic
aaucaaagcccaugucaau

SEQ ID NO: 3347 - RNA, 19 nt, Artificial Sequence
  Synthetic
cggaaaggaugccugguuu

SEQ ID NO: 3348 - RNA, 19 nt, Artificial Sequence
  Synthetic
gucaaugucuccauggaua

SEQ ID NO: 3349 - RNA, 19 nt, Artificial Sequence
  Synthetic
uggaaugggagaagacuau

SEQ ID NO: 3350 - RNA, 19 nt, Artificial Sequence
  Synthetic
cagaaggacuugaaaauca

SEQ ID NO: 3351 - RNA, 19 nt, Artificial Sequence
  Synthetic
cugacaagcuucugcacau

SEQ ID NO: 3352 - RNA, 19 nt, Artificial Sequence
  Synthetic
cuggaaugggagaagacua

SEQ ID NO: 3353 - RNA, 19 nt, Artificial Sequence
  Synthetic
ccaaaugggaguaugacga

SEQ ID NO: 3354 - RNA, 19 nt, Artificial Sequence
  Synthetic
uggaagaggacgggcuuua

SEQ ID NO: 3355 - RNA, 19 nt, Artificial Sequence
  Synthetic
acaaaacucuccagauuaa

SEQ ID NO: 3356 - RNA, 19 nt, Artificial Sequence
  Synthetic
cagcagcacccuggagaua

SEQ ID NO: 3357 - RNA, 19 nt, Artificial Sequence
  Synthetic
gggaguaugacgaaagcca

SEQ ID NO: 3358 - RNA, 19 nt, Artificial Sequence
  Synthetic
agaugaugaugaugauuca

SEQ ID NO: 3359 - RNA, 19 nt, Artificial Sequence
  Synthetic
ccaagauucagaaggacuu

SEQ ID NO: 3360 - RNA, 19 nt, Artificial Sequence
  Synthetic
cucugauggugauggcaaa

SEQ ID NO: 3361 - RNA, 19 nt, Artificial Sequence
  Synthetic
guuccaaaugggaguauga

SEQ ID NO: 3362 - RNA, 19 nt, Artificial Sequence
  Synthetic
gcacauccggauagaagau

SEQ ID NO: 3363 - RNA, 19 nt, Artificial Sequence
  Synthetic
ggagauuccaucacaaaca

SEQ ID NO: 3364 - RNA, 19 nt, Artificial Sequence
  Synthetic
ugaaguacugcguggugua

SEQ ID NO: 3365 - RNA, 19 nt, Artificial Sequence
  Synthetic
gcgugguguaugauaacaa

SEQ ID NO: 3366 - RNA, 19 nt, Artificial Sequence
  Synthetic
gguccugggccuaugucaa

SEQ ID NO: 3367 - RNA, 19 nt, Artificial Sequence
  Synthetic
aaaucaaagcccaugucaa

SEQ ID NO: 3368 - RNA, 19 nt, Artificial Sequence
  Synthetic
gugaaccaacagagcuuua

SEQ ID NO: 3369 - RNA, 19 nt, Artificial Sequence
  Synthetic
uuuacaacauccugaauca

SEQ ID NO: 3370 - RNA, 19 nt, Artificial Sequence
  Synthetic
acugcgugguguaugauaa

SEQ ID NO: 3371 - RNA, 19 nt, Artificial Sequence
  Synthetic
ccaacagagcuuuacaaca

SEQ ID NO: 3372 - RNA, 19 nt, Artificial Sequence
  Synthetic
uugcagagguccugggccu

SEQ ID NO: 3373 - RNA, 19 nt, Artificial Sequence
  Synthetic
cauuagagcucgaaauaaa

SEQ ID NO: 3374 - RNA, 19 nt, Artificial Sequence
  Synthetic
cgagaaagacagaagguua

SEQ ID NO: 3375 - RNA, 19 nt, Artificial Sequence
  Synthetic
caucaugaguggugacuua

SEQ ID NO: 3376 - RNA, 19 nt, Artificial Sequence
  Synthetic
cuaaagaccugcuguaaua

SEQ ID NO: 3377 - RNA, 19 nt, Artificial Sequence
  Synthetic
agacagaagguuacagaaa

SEQ ID NO: 3378 - RNA, 19 nt, Artificial Sequence
  Synthetic
gcguaaaugcaguggccaa

SEQ ID NO: 3379 - RNA, 19 nt, Artificial Sequence
  Synthetic
guacauguguugagcguau

SEQ ID NO: 3380 - RNA, 19 nt, Artificial Sequence
  Synthetic
ggccacagcagaagagaua

SEQ ID NO: 3381 - RNA, 19 nt, Artificial Sequence
  Synthetic
cuuguaaagacaugagaaa

SEQ ID NO: 3382 - RNA, 19 nt, Artificial Sequence
  Synthetic
ccauguagaacuugaacua

SEQ ID NO: 3383 - RNA, 19 nt, Artificial Sequence
  Synthetic
gagaaugagucuauuaaga

SEQ ID NO: 3384 - RNA, 19 nt, Artificial Sequence
  Synthetic
agaaauagcuguauagaug

SEQ ID NO: 3385 - RNA, 19 nt, Artificial Sequence
  Synthetic
cauugaaggguucgaaaua

SEQ ID NO: 3386 - RNA, 19 nt, Artificial Sequence
  Synthetic
ggcaacaggaggaggauau

SEQ ID NO: 3387 - RNA, 19 nt, Artificial Sequence
  Synthetic
gaugcaagacccagcguaa

SEQ ID NO: 3388 - RNA, 19 nt, Artificial Sequence
  Synthetic
ucgaauaggucauggugau

SEQ ID NO: 3389 - RNA, 19 nt, Artificial Sequence
  Synthetic
gcaagguguuuaaguaauu

SEQ ID NO: 3390 - RNA, 19 nt, Artificial Sequence
  Synthetic
cauucaaguagcagacaaa

SEQ ID NO: 3391 - RNA, 19 nt, Artificial Sequence
  Synthetic
gcgacaaguagaggagaaa

SEQ ID NO: 3392 - RNA, 19 nt, Artificial Sequence
  Synthetic
cgcgacaaguagaggagaa

SEQ ID NO: 3393 - RNA, 19 nt, Artificial Sequence
  Synthetic
ugaaagugaugaugcauau

SEQ ID NO: 3394 - RNA, 19 nt, Artificial Sequence
  Synthetic
auggauaaguuuuggacau

SEQ ID NO: 3395 - RNA, 19 nt, Artificial Sequence
  Synthetic
aaucaccauuggagaauaa

SEQ ID NO: 3396 - RNA, 19 nt, Artificial Sequence
  Synthetic
ucgaaauacugguacaaaa

SEQ ID NO: 3397 - RNA, 19 nt, Artificial Sequence
  Synthetic
caacaaggcaacaggagga

SEQ ID NO: 3398 - RNA, 19 nt, Artificial Sequence
  Synthetic
gaagaaaggagcugagaug

SEQ ID NO: 3399 - RNA, 19 nt, Artificial Sequence
  Synthetic
ggauauauguuuguggaau

SEQ ID NO: 3400 - RNA, 19 nt, Artificial Sequence
  Synthetic
guggauggauggacaguuu

SEQ ID NO: 3401 - RNA, 19 nt, Artificial Sequence
  Synthetic
gggcuuaauugaaacaaca

SEQ ID NO: 3402 - RNA, 19 nt, Artificial Sequence
  Synthetic
caggaaggccacagcagaa

SEQ ID NO: 3403 - RNA, 19 nt, Artificial Sequence
  Synthetic
guauagagauagugugcaa

SEQ ID NO: 3404 - RNA, 19 nt, Artificial Sequence
  Synthetic
gacaaaggguggaggauau

SEQ ID NO: 3405 - RNA, 19 nt, Artificial Sequence
  Synthetic
gcauucagcuauaaagaaa

SEQ ID NO: 3406 - RNA, 19 nt, Artificial Sequence
  Synthetic
agacaauuccugugguaua

SEQ ID NO: 3407 - RNA, 19 nt, Artificial Sequence
  Synthetic
cauuuggaauuguggguaa

SEQ ID NO: 3408 - RNA, 19 nt, Artificial Sequence
  Synthetic
guagaaaaggaguggauaa

SEQ ID NO: 3409 - RNA, 19 nt, Artificial Sequence
  Synthetic
gagauagugugcaaggaua

SEQ ID NO: 3410 - RNA, 19 nt, Artificial Sequence
  Synthetic
caguaagaauugcugauaa

SEQ ID NO: 3411 - RNA, 19 nt, Artificial Sequence
  Synthetic
acagaguaaacuagggaua

SEQ ID NO: 3412 - RNA, 19 nt, Artificial Sequence
  Synthetic
gaaaauguguccagagauu

SEQ ID NO: 3413 - RNA, 19 nt, Artificial Sequence
  Synthetic
agacaaaggguggaggaua

SEQ ID NO: 3414 - RNA, 19 nt, Artificial Sequence
  Synthetic
auuaauggcuggaaaguuu

SEQ ID NO: 3415 - RNA, 19 nt, Artificial Sequence
  Synthetic
gcacagagccauggagaca

SEQ ID NO: 3416 - RNA, 19 nt, Artificial Sequence
  Synthetic
ggaagaacagaguaaacua

SEQ ID NO: 3417 - RNA, 19 nt, Artificial Sequence
  Synthetic
ggagacaauuccuguggua

SEQ ID NO: 3418 - RNA, 19 nt, Artificial Sequence
  Synthetic
gcucuaagggauggaaaua

SEQ ID NO: 3419 - RNA, 19 nt, Artificial Sequence
  Synthetic
ggaggauaugaaagugaaa

SEQ ID NO: 3420 - RNA, 19 nt, Artificial Sequence
  Synthetic
cuuauaaacaggaagaaca

SEQ ID NO: 3421 - RNA, 19 nt, Artificial Sequence
  Synthetic
ugcuaauguuggacaguua

SEQ ID NO: 3422 - RNA, 19 nt, Artificial Sequence
  Synthetic
gaaauaagcuggcacagau

SEQ ID NO: 3423 - RNA, 19 nt, Artificial Sequence
  Synthetic
cuucagcauucgaguuuaa

SEQ ID NO: 3424 - RNA, 19 nt, Artificial Sequence
  Synthetic
gcugauaccaacaagacaa

SEQ ID NO: 3425 - RNA, 19 nt, Artificial Sequence
  Synthetic
gcgagugggccaugguaau

SEQ ID NO: 3426 - RNA, 19 nt, Artificial Sequence
  Synthetic
gugaaagaugucauguaua

SEQ ID NO: 3427 - RNA, 19 nt, Artificial Sequence
  Synthetic
gcuacaauuucuagucaga

SEQ ID NO: 3428 - RNA, 19 nt, Artificial Sequence
  Synthetic
uuacaaggcucuaagggau

SEQ ID NO: 3429 - RNA, 19 nt, Artificial Sequence
  Synthetic
aauuaugaguucugugaca

SEQ ID NO: 3430 - RNA, 19 nt, Artificial Sequence
  Synthetic
gugaaagugcuuacccaaa

SEQ ID NO: 3431 - RNA, 19 nt, Artificial Sequence
  Synthetic
agauagugugcaaggauau

SEQ ID NO: 3432 - RNA, 19 nt, Artificial Sequence
  Synthetic
gcacagucacacaagcuua

SEQ ID NO: 3433 - RNA, 19 nt, Artificial Sequence
  Synthetic
aaugaaagcuggagaauaa

SEQ ID NO: 3434 - RNA, 19 nt, Artificial Sequence
  Synthetic
cugaagagaucaagaauuu

SEQ ID NO: 3435 - RNA, 19 nt, Artificial Sequence
  Synthetic
cgauaugaacuuugugaua

SEQ ID NO: 3436 - RNA, 19 nt, Artificial Sequence
  Synthetic
ccacaagucuguaaacaua

SEQ ID NO: 3437 - RNA, 19 nt, Artificial Sequence
  Synthetic
ccagaaacaucaugaaaga

SEQ ID NO: 3438 - RNA, 19 nt, Artificial Sequence
  Synthetic
ggcaaaggguggagguuau

SEQ ID NO: 3439 - RNA, 19 nt, Artificial Sequence
  Synthetic
gaaacuguguguaaggaua

SEQ ID NO: 3440 - RNA, 19 nt, Artificial Sequence
  Synthetic
ggaacuacagagagagauu

SEQ ID NO: 3441 - RNA, 19 nt, Artificial Sequence
  Synthetic
uguccaaacuguuguauaa

SEQ ID NO: 3442 - RNA, 19 nt, Artificial Sequence
  Synthetic
gcauuuaaguggcuagcaa

SEQ ID NO: 3443 - RNA, 19 nt, Artificial Sequence
  Synthetic
ccaaaugaaagcuggagaa

SEQ ID NO: 3444 - RNA, 19 nt, Artificial Sequence
  Synthetic
guagaaagucuucggaauu

SEQ ID NO: 3445 - RNA, 19 nt, Artificial Sequence
  Synthetic
gacuagaaacuguguguaa

SEQ ID NO: 3446 - RNA, 19 nt, Artificial Sequence
  Synthetic
guguaaggauauuaggaau

SEQ ID NO: 3447 - RNA, 19 nt, Artificial Sequence
  Synthetic
ccucuguaauagugaacaa

SEQ ID NO: 3448 - RNA, 19 nt, Artificial Sequence
  Synthetic
uagaggaacuacagagaga

SEQ ID NO: 3449 - RNA, 19 nt, Artificial Sequence
  Synthetic
gaguauagaaggcagggaa

SEQ ID NO: 3450 - RNA, 19 nt, Artificial Sequence
  Synthetic
cuggagaauaacaaagaua

SEQ ID NO: 3451 - RNA, 19 nt, Artificial Sequence
  Synthetic
ggacaucgauuucaacuaa

SEQ ID NO: 3452 - RNA, 19 nt, Artificial Sequence
  Synthetic
ggccaaagauguaacuuau

SEQ ID NO: 3453 - RNA, 19 nt, Artificial Sequence
  Synthetic
gcagaugacaagacaguuu

SEQ ID NO: 3454 - RNA, 19 nt, Artificial Sequence
  Synthetic
ugagagaaucauuacgaaa

SEQ ID NO: 3455 - RNA, 19 nt, Artificial Sequence
  Synthetic
caacagauacaaagaacuu

SEQ ID NO: 3456 - RNA, 19 nt, Artificial Sequence
  Synthetic
ggguggagguuaugaaagu

SEQ ID NO: 3457 - RNA, 19 nt, Artificial Sequence
  Synthetic
ggcaaaugcuguuacaaau

SEQ ID NO: 3458 - RNA, 19 nt, Artificial Sequence
  Synthetic
gcaauaaagcucuguuaca

SEQ ID NO: 3459 - RNA, 19 nt, Artificial Sequence
  Synthetic
cugcauaccucaacuuuua

SEQ ID NO: 3460 - RNA, 19 nt, Artificial Sequence
  Synthetic
gaaaauggguggaagcuau

SEQ ID NO: 3461 - RNA, 19 nt, Artificial Sequence
  Synthetic
uugaaguccuuguggagaa

SEQ ID NO: 3462 - RNA, 19 nt, Artificial Sequence
  Synthetic
cugcagaagucuccaauau

SEQ ID NO: 3463 - RNA, 19 nt, Artificial Sequence
  Synthetic
gaaucagccuuuagaguua

SEQ ID NO: 3464 - RNA, 19 nt, Artificial Sequence
  Synthetic
gcgaaugcccagaguauua

SEQ ID NO: 3465 - RNA, 19 nt, Artificial Sequence
  Synthetic
ggagaguggaguagaggaa

SEQ ID NO: 3466 - RNA, 19 nt, Artificial Sequence
  Synthetic
gcauguaacuucaagguuu

SEQ ID NO: 3467 - RNA, 19 nt, Artificial Sequence
  Synthetic
gcugggagcagguggauaa

SEQ ID NO: 3468 - RNA, 19 nt, Artificial Sequence
  Synthetic
acaaagaacuggaaagugu

SEQ ID NO: 3469 - RNA, 19 nt, Artificial Sequence
  Synthetic
gggcaggcauugagauaca

SEQ ID NO: 3470 - RNA, 19 nt, Artificial Sequence
  Synthetic
acauguuaguggaagauaa

SEQ ID NO: 3471 - RNA, 19 nt, Artificial Sequence
  Synthetic
caaauaaaguugaguguuc

SEQ ID NO: 3472 - RNA, 19 nt, Artificial Sequence
  Synthetic
cuccauagcuguacauaua

SEQ ID NO: 3473 - RNA, 19 nt, Artificial Sequence
  Synthetic
cuucaggagcagagaguuu

SEQ ID NO: 3474 - RNA, 19 nt, Artificial Sequence
  Synthetic
uguugaaugccgagauaua

SEQ ID NO: 3475 - RNA, 19 nt, Artificial Sequence
  Synthetic
aaggagagcaggaggaaga

SEQ ID NO: 3476 - RNA, 19 nt, Artificial Sequence
  Synthetic
cagacauguuaguggaaga

SEQ ID NO: 3477 - RNA, 19 nt, Artificial Sequence
  Synthetic
cauguaacuucaagguuua

SEQ ID NO: 3478 - RNA, 19 nt, Artificial Sequence
  Synthetic
uugagauacaggaggguaa

SEQ ID NO: 3479 - RNA, 19 nt, Artificial Sequence
  Synthetic
gcuuauagaaaguguugaa

SEQ ID NO: 3480 - RNA, 19 nt, Artificial Sequence
  Synthetic
gaagguuggagaagaguua

SEQ ID NO: 3481 - RNA, 19 nt, Artificial Sequence
  Synthetic
gauaaggugaagucaguaa

SEQ ID NO: 3482 - RNA, 19 nt, Artificial Sequence
  Synthetic
agucagaagccgugcugua

SEQ ID NO: 3483 - RNA, 19 nt, Artificial Sequence
  Synthetic
gggagcagguggauaaaca

SEQ ID NO: 3484 - RNA, 19 nt, Artificial Sequence
  Synthetic
guaaauaguggcaaggaca

SEQ ID NO: 3485 - RNA, 19 nt, Artificial Sequence
  Synthetic
caaauuaugugguagcuau

SEQ ID NO: 3486 - RNA, 19 nt, Artificial Sequence
  Synthetic
ccaacaucaaugagaagua

SEQ ID NO: 3487 - RNA, 19 nt, Artificial Sequence
  Synthetic
ccauuacagcuuauagaaa

SEQ ID NO: 3488 - RNA, 19 nt, Artificial Sequence
  Synthetic
gaacacuucucgagacuuu

SEQ ID NO: 3489 - RNA, 19 nt, Artificial Sequence
  Synthetic
cugcauagccacucaggaa

SEQ ID NO: 3490 - RNA, 19 nt, Artificial Sequence
  Synthetic
acacuuuaauggagacuuu

SEQ ID NO: 3491 - RNA, 19 nt, Artificial Sequence
  Synthetic
cagggcaggcauugagaua

SEQ ID NO: 3492 - RNA, 19 nt, Artificial Sequence
  Synthetic
guagaaacuuugaagaaac

SEQ ID NO: 3493 - RNA, 19 nt, Artificial Sequence
  Synthetic
cagcauagguuacggcaaa

SEQ ID NO: 3494 - RNA, 19 nt, Artificial Sequence
  Synthetic
ggaggaagacauugguaaa

SEQ ID NO: 3495 - RNA, 19 nt, Artificial Sequence
  Synthetic
uugcagaaauugugggaau

SEQ ID NO: 3496 - RNA, 19 nt, Artificial Sequence
  Synthetic
agaaagacuacuugagcaa

SEQ ID NO: 3497 - RNA, 19 nt, Artificial Sequence
  Synthetic
acaaagagcuggagaacgu

SEQ ID NO: 3498 - RNA, 19 nt, Artificial Sequence
  Synthetic
gcaagaggccaaacaguaa

SEQ ID NO: 3499 - RNA, 19 nt, Artificial Sequence
  Synthetic
ccaaggaacuagugaagga

SEQ ID NO: 3500 - RNA, 19 nt, Artificial Sequence
  Synthetic
ccaaauggcugcagcacuu

SEQ ID NO: 3501 - RNA, 19 nt, Artificial Sequence
  Synthetic
ucagcaaacuguaggagaa

SEQ ID NO: 3502 - RNA, 19 nt, Artificial Sequence
  Synthetic
gggaggaagacauugguaa

SEQ ID NO: 3503 - RNA, 19 nt, Artificial Sequence
  Synthetic
aagcaagucucuagcacaa

SEQ ID NO: 3504 - RNA, 19 nt, Artificial Sequence
  Synthetic
aaagacuacuugagcaaua

SEQ ID NO: 3505 - RNA, 19 nt, Artificial Sequence
  Synthetic
cgggaaaugaagagcaaca

SEQ ID NO: 3506 - RNA, 19 nt, Artificial Sequence
  Synthetic
aaauauuacuggacccaua

SEQ ID NO: 3507 - RNA, 19 nt, Artificial Sequence
  Synthetic
ugguaaaacuggugcaaca

SEQ ID NO: 3508 - RNA, 19 nt, Artificial Sequence
  Synthetic
ccuucgagcuggcaauaaa

SEQ ID NO: 3509 - RNA, 19 nt, Artificial Sequence
  Synthetic
gguacaaacaagaggugga

SEQ ID NO: 3510 - RNA, 19 nt, Artificial Sequence
  Synthetic
aagagaauguggaggacca

SEQ ID NO: 3511 - RNA, 19 nt, Artificial Sequence
  Synthetic
gcugggaaccuguugauaa

SEQ ID NO: 3512 - RNA, 19 nt, Artificial Sequence
  Synthetic
gugaaugugaagaguacua

SEQ ID NO: 3513 - RNA, 19 nt, Artificial Sequence
  Synthetic
agaucaaaguccuagaaga

SEQ ID NO: 3514 - RNA, 19 nt, Artificial Sequence
  Synthetic
ggaaccuguugauaagaaa

SEQ ID NO: 3515 - RNA, 19 nt, Artificial Sequence
  Synthetic
cugacaaagagcuggagaa

SEQ ID NO: 3516 - RNA, 19 nt, Artificial Sequence
  Synthetic
caauaaaccuuucaagagu

SEQ ID NO: 3517 - RNA, 19 nt, Artificial Sequence
  Synthetic
gaagaaacccauugcuaca

SEQ ID NO: 3518 - RNA, 19 nt, Artificial Sequence
  Synthetic
ccauggacuaugaggauga

SEQ ID NO: 3519 - RNA, 19 nt, Artificial Sequence
  Synthetic
gaucaaaguccuagaagag

SEQ ID NO: 3520 - RNA, 19 nt, Artificial Sequence
  Synthetic
ggguggaggcugugaaugu

SEQ ID NO: 3521 - RNA, 19 nt, Artificial Sequence
  Synthetic
uguuguagcaagaggccaa

SEQ ID NO: 3522 - RNA, 19 nt, Artificial Sequence
  Synthetic
agugaaggaggaagagaau

SEQ ID NO: 3523 - RNA, 19 nt, Artificial Sequence
  Synthetic
ggaaauugucagaaggaaa

SEQ ID NO: 3524 - RNA, 19 nt, Artificial Sequence
  Synthetic
ggacauaaauuuucagaga

SEQ ID NO: 3525 - RNA, 19 nt, Artificial Sequence
  Synthetic
ggaaauugucccaaggaaa

SEQ ID NO: 3526 - RNA, 19 nt, Artificial Sequence
  Synthetic
caacagagcagcuggaaaa

SEQ ID NO: 3527 - RNA, 19 nt, Artificial Sequence
  Synthetic
aguugaaggagaagacuua

SEQ ID NO: 3528 - RNA, 19 nt, Artificial Sequence
  Synthetic
gguccagccuucagaaauu

SEQ ID NO: 3529 - RNA, 19 nt, Artificial Sequence
  Synthetic
aggaaagagaagagcucaa

SEQ ID NO: 3530 - RNA, 19 nt, Artificial Sequence
  Synthetic
ugaauaugcagaagaguuu

SEQ ID NO: 3531 - RNA, 19 nt, Artificial Sequence
  Synthetic
ccaacagagcagcuggaaa

SEQ ID NO: 3532 - RNA, 19 nt, Artificial Sequence
  Synthetic
gaaagagauugccaugaua

SEQ ID NO: 3533 - RNA, 19 nt, Artificial Sequence
  Synthetic
gugaauaugcagaagaguu

SEQ ID NO: 3534 - RNA, 19 nt, Artificial Sequence
  Synthetic
ucaaaggauucaugguuuu

SEQ ID NO: 3535 - RNA, 19 nt, Artificial Sequence
  Synthetic
cuucuuggccaaagcaaua

SEQ ID NO: 3536 - RNA, 19 nt, Artificial Sequence
  Synthetic
uaucaaagcuguuauggau

SEQ ID NO: 3537 - RNA, 19 nt, Artificial Sequence
  Synthetic
gagcauauccggacgacca

SEQ ID NO: 3538 - RNA, 19 nt, Artificial Sequence
  Synthetic
augaagaucucuaugcauu

SEQ ID NO: 3539 - RNA, 19 nt, Artificial Sequence
  Synthetic
cugcagucuucuuggccaa

SEQ ID NO: 3540 - RNA, 19 nt, Artificial Sequence
  Synthetic
gagauugccaugauauuua

SEQ ID NO: 3541 - RNA, 19 nt, Artificial Sequence
  Synthetic
ggucgaacaaguaaaauua

SEQ ID NO: 3542 - RNA, 19 nt, Artificial Sequence
  Synthetic
guuccaaguuccggagcaa

SEQ ID NO: 3543 - RNA, 19 nt, Artificial Sequence
  Synthetic
ucucacagauuuacaguuu

SEQ ID NO: 3544 - RNA, 19 nt, Artificial Sequence
  Synthetic
agaaagagauugccaugau

SEQ ID NO: 3545 - RNA, 19 nt, Artificial Sequence
  Synthetic
gauuucaguuuguuggaau

SEQ ID NO: 3546 - RNA, 19 nt, Artificial Sequence
  Synthetic
cuggaaaagguuaugaaaa

SEQ ID NO: 3547 - RNA, 19 nt, Artificial Sequence
  Synthetic
cauuguucccagagaaaga

SEQ ID NO: 3548 - RNA, 19 nt, Artificial Sequence
  Synthetic
gcauuugaccgaacaguuu

SEQ ID NO: 3549 - RNA, 19 nt, Artificial Sequence
  Synthetic
ggccaaaacugaaugcaau

SEQ ID NO: 3550 - RNA, 19 nt, Artificial Sequence
  Synthetic
ggauggugacccaaaggaa

SEQ ID NO: 3551 - RNA, 19 nt, Artificial Sequence
  Synthetic
uggaagaccaaaagaagua

SEQ ID NO: 3552 - RNA, 19 nt, Artificial Sequence
  Synthetic
gaacauguaccaucaguuu

SEQ ID NO: 3553 - RNA, 19 nt, Artificial Sequence
  Synthetic
agggaaaggcuaugagaau

SEQ ID NO: 3554 - RNA, 19 nt, Artificial Sequence
  Synthetic
gcaagaacuuucagauaau

SEQ ID NO: 3555 - RNA, 19 nt, Artificial Sequence
  Synthetic
uaaagaagaaagagagcaa

SEQ ID NO: 3556 - RNA, 19 nt, Artificial Sequence
  Synthetic
uugcaaggccagugaaaua

SEQ ID NO: 3557 - RNA, 19 nt, Artificial Sequence
  Synthetic
agacaagagaaaugagcaa

SEQ ID NO: 3558 - RNA, 19 nt, Artificial Sequence
  Synthetic
acucaagauucaagaaaga

SEQ ID NO: 3559 - RNA, 19 nt, Artificial Sequence
  Synthetic
ggaaaggcuaugagaauga

SEQ ID NO: 3560 - RNA, 19 nt, Artificial Sequence
  Synthetic
aaaucgugcugcagggaaa

SEQ ID NO: 3561 - RNA, 19 nt, Artificial Sequence
  Synthetic
gcuaugagaaugaagacaa

SEQ ID NO: 3562 - RNA, 19 nt, Artificial Sequence
  Synthetic
cugcaagaacuuucagaua

SEQ ID NO: 3563 - RNA, 19 nt, Artificial Sequence
  Synthetic
aaagaaaucucuccaguua

SEQ ID NO: 3564 - RNA, 19 nt, Artificial Sequence
  Synthetic
agacauacuugcuuuguua

SEQ ID NO: 3565 - RNA, 19 nt, Artificial Sequence
  Synthetic
uggauaaagaagaaagaga

SEQ ID NO: 3566 - RNA, 19 nt, Artificial Sequence
  Synthetic
gcuccaggccauuaggaaa

SEQ ID NO: 3567 - RNA, 19 nt, Artificial Sequence
  Synthetic
ccucagaccuggaaguuga

SEQ ID NO: 3568 - RNA, 19 nt, Artificial Sequence
  Synthetic
ggaagaaacucagcagcua

SEQ ID NO: 3569 - RNA, 19 nt, Artificial Sequence
  Synthetic
ugcaagaacuuucagauaa

SEQ ID NO: 3570 - RNA, 19 nt, Artificial Sequence
  Synthetic
agugaaauaugaggaguua

SEQ ID NO: 3571 - RNA, 19 nt, Artificial Sequence
  Synthetic
ggaacagucugcagaaaau

SEQ ID NO: 3572 - RNA, 19 nt, Artificial Sequence
  Synthetic
cagugaaauaugaggaguu

SEQ ID NO: 3573 - RNA, 19 nt, Artificial Sequence
  Synthetic
caucauaccucaggaaaga

SEQ ID NO: 3574 - RNA, 19 nt, Artificial Sequence
  Synthetic
ggagaacucuggcugguua

SEQ ID NO: 3575 - RNA, 19 nt, Artificial Sequence
  Synthetic
gcagcuagaggaagaacua

SEQ ID NO: 3576 - RNA, 19 nt, Artificial Sequence
  Synthetic
aggaagaacuagaggcccu

SEQ ID NO: 3577 - RNA, 19 nt, Artificial Sequence
  Synthetic
cauaauggaugcaggaauc

SEQ ID NO: 3578 - RNA, 19 nt, Artificial Sequence
  Synthetic
cuaugagaaugaagacaau

SEQ ID NO: 3579 - RNA, 19 nt, Artificial Sequence
  Synthetic
gacgagaacucaagauuca

SEQ ID NO: 3580 - RNA, 19 nt, Artificial Sequence
  Synthetic
auguauaaccgcuuugaaa

SEQ ID NO: 3581 - RNA, 19 nt, Artificial Sequence
  Synthetic
cuggaagaaguaagacaua

SEQ ID NO: 3582 - RNA, 19 nt, Artificial Sequence
  Synthetic
gaacucaagauucaagaaa

SEQ ID NO: 3583 - RNA, 19 nt, Artificial Sequence
  Synthetic
caacagaaacuaugagaua

SEQ ID NO: 3584 - RNA, 19 nt, Artificial Sequence
  Synthetic
gagggaaaguggauggaaa

SEQ ID NO: 3585 - RNA, 19 nt, Artificial Sequence
  Synthetic
ucuaagagucuaugagaaa

SEQ ID NO: 3586 - RNA, 19 nt, Artificial Sequence
  Synthetic
ugaaauugguggaucguua

SEQ ID NO: 3587 - RNA, 19 nt, Artificial Sequence
  Synthetic
auuaagaaacagagagcaa

SEQ ID NO: 3588 - RNA, 19 nt, Artificial Sequence
  Synthetic
ucaaaagagaugagggaaa

SEQ ID NO: 3589 - RNA, 19 nt, Artificial Sequence
  Synthetic
gggaauuacuuuacugauu

SEQ ID NO: 3590 - RNA, 19 nt, Artificial Sequence
  Synthetic
aguucaaaguucagaagua

SEQ ID NO: 3591 - RNA, 19 nt, Artificial Sequence
  Synthetic
ccauaacuguugugagauu

SEQ ID NO: 3592 - RNA, 19 nt, Artificial Sequence
  Synthetic
gugcagaccuccaccauaa

SEQ ID NO: 3593 - RNA, 19 nt, Artificial Sequence
  Synthetic
guucaaaguucagaaguaa

SEQ ID NO: 3594 - RNA, 19 nt, Artificial Sequence
  Synthetic
gaaaccagcuaaugggauu

SEQ ID NO: 3595 - RNA, 19 nt, Artificial Sequence
  Synthetic
uaacagaugccaacagaaa

SEQ ID NO: 3596 - RNA, 19 nt, Artificial Sequence
  Synthetic
acugugaauugcagaauaa

SEQ ID NO: 3597 - RNA, 19 nt, Artificial Sequence
  Synthetic
caccauaacuguugugaga

SEQ ID NO: 3598 - RNA, 19 nt, Artificial Sequence
  Synthetic
cugaaauagugguuccuaa

SEQ ID NO: 3599 - RNA, 19 nt, Artificial Sequence
  Synthetic
ggaaguuugugaauugaaa

SEQ ID NO: 3600 - RNA, 19 nt, Artificial Sequence
  Synthetic
cugaauacccugauggaga

SEQ ID NO: 3601 - RNA, 19 nt, Artificial Sequence
  Synthetic
gcaccaaggaggcagacua

SEQ ID NO: 3602 - RNA, 19 nt, Artificial Sequence
  Synthetic
ggaaauuaagaaacagaga

SEQ ID NO: 3603 - RNA, 19 nt, Artificial Sequence
  Synthetic
ucacaauggucaauaauga

SEQ ID NO: 3604 - RNA, 19 nt, Artificial Sequence
  Synthetic
ccggaaagaaacauggauu

SEQ ID NO: 3605 - RNA, 19 nt, Artificial Sequence
  Synthetic
gcucagauggaucaaguaa

SEQ ID NO: 3606 - RNA, 19 nt, Artificial Sequence
  Synthetic
ggugcagcccggaaagaaa

SEQ ID NO: 3607 - RNA, 19 nt, Artificial Sequence
  Synthetic
gcaauuaauggaacaguuu

SEQ ID NO: 3608 - RNA, 19 nt, Artificial Sequence
  Synthetic
uauuauggaugcuggaauu

SEQ ID NO: 3609 - RNA, 19 nt, Artificial Sequence
  Synthetic
acacaagaccaaaguugaa

SEQ ID NO: 3610 - RNA, 19 nt, Artificial Sequence
  Synthetic
cuagagagccuccuggaaa

SEQ ID NO: 3611 - RNA, 19 nt, Artificial Sequence
  Synthetic
gaguaagaaaccagcuaau

SEQ ID NO: 3612 - RNA, 19 nt, Artificial Sequence
  Synthetic
gcaguaaugugaaagugaa

SEQ ID NO: 3613 - RNA, 19 nt, Artificial Sequence
  Synthetic
gaugagaacuaaagagaaa

SEQ ID NO: 3614 - RNA, 19 nt, Artificial Sequence
  Synthetic
ggagggagggaaaggauuu

SEQ ID NO: 3615 - RNA, 19 nt, Artificial Sequence
  Synthetic
gugaugagaacuaaagaga

SEQ ID NO: 3616 - RNA, 19 nt, Artificial Sequence
  Synthetic
uagcugaccugcuggacaa

SEQ ID NO: 3617 - RNA, 19 nt, Artificial Sequence
  Synthetic
acugagagcccuaguguga

SEQ ID NO: 3618 - RNA, 19 nt, Artificial Sequence
  Synthetic
gggagggagggaaaggauu

SEQ ID NO: 3619 - RNA, 19 nt, Artificial Sequence
  Synthetic
ugggaacgguggacaucaa

SEQ ID NO: 3620 - RNA, 19 nt, Artificial Sequence
  Synthetic
ccucgugguuugacaacau

SEQ ID NO: 3621 - RNA, 19 nt, Artificial Sequence
  Synthetic
gaauaugguuggccugcau

SEQ ID NO: 3622 - RNA, 19 nt, Artificial Sequence
  Synthetic
gaaggaaacuccauguugu

SEQ ID NO: 3623 - RNA, 19 nt, Artificial Sequence
  Synthetic
ugaugagaacuaaagagaa

SEQ ID NO: 3624 - RNA, 19 nt, Artificial Sequence
  Synthetic
aaggaaacuccauguugua

SEQ ID NO: 3625 - RNA, 19 nt, Artificial Sequence
  Synthetic
gcgccuggguuccauguuu

SEQ ID NO: 3626 - RNA, 19 nt, Artificial Sequence
  Synthetic
gggaaggaaacuccauguu

SEQ ID NO: 3627 - RNA, 19 nt, Artificial Sequence
  Synthetic
gcccuagugugaugagaac

SEQ ID NO: 3628 - RNA, 19 nt, Artificial Sequence
  Synthetic
gucaaguggugaugucguu

SEQ ID NO: 3629 - RNA, 19 nt, Artificial Sequence
  Synthetic
ccaggccuuuguuaggaaa

SEQ ID NO: 3630 - RNA, 19 nt, Artificial Sequence
  Synthetic
ggaagggucaggguagaga

SEQ ID NO: 3631 - RNA, 19 nt, Artificial Sequence
  Synthetic
gggugaagguuguggauga

SEQ ID NO: 3632 - RNA, 19 nt, Artificial Sequence
  Synthetic
gggaagaaaugguucaaau

SEQ ID NO: 3633 - RNA, 19 nt, Artificial Sequence
  Synthetic
uggcaaagcgagagaaaga

SEQ ID NO: 3634 - RNA, 19 nt, Artificial Sequence
  Synthetic
cagcaaagguauuguggau

SEQ ID NO: 3635 - RNA, 19 nt, Artificial Sequence
  Synthetic
gcaaagguauuguggauga

SEQ ID NO: 3636 - RNA, 19 nt, Artificial Sequence
  Synthetic
gggcaauaugaguuaauaa

SEQ ID NO: 3637 - RNA, 19 nt, Artificial Sequence
  Synthetic
ugauauugcuacagaaaca

SEQ ID NO: 3638 - RNA, 19 nt, Artificial Sequence
  Synthetic
agaaagaccuucagagacu

SEQ ID NO: 3639 - RNA, 19 nt, Artificial Sequence
  Synthetic
aggaagagcuccagcagau

SEQ ID NO: 3640 - RNA, 19 nt, Artificial Sequence
  Synthetic
cgaagaagacuaaggcuuu

SEQ ID NO: 3641 - RNA, 19 nt, Artificial Sequence
  Synthetic
gguugggagauuugaauua

SEQ ID NO: 3642 - RNA, 19 nt, Artificial Sequence
  Synthetic
guccauggcuguagagaga

SEQ ID NO: 3643 - RNA, 19 nt, Artificial Sequence
  Synthetic
uauacagaguugagaguuu

SEQ ID NO: 3644 - RNA, 19 nt, Artificial Sequence
  Synthetic
ucaccuggaucgaggcaaa

SEQ ID NO: 3645 - RNA, 19 nt, Artificial Sequence
  Synthetic
ccucugagcuuuucauuua

SEQ ID NO: 3646 - RNA, 19 nt, Artificial Sequence
  Synthetic
gcuucuuguuccagagcaa

SEQ ID NO: 3647 - RNA, 19 nt, Artificial Sequence
  Synthetic
caaaugagacaguggacau

SEQ ID NO: 3648 - RNA, 19 nt, Artificial Sequence
  Synthetic
cgggagaagauaagauuga

SEQ ID NO: 3649 - RNA, 19 nt, Artificial Sequence
  Synthetic
gaucacauuuaguagcaua

SEQ ID NO: 3650 - RNA, 19 nt, Artificial Sequence
  Synthetic
ucaaacauauccuggcaaa

SEQ ID NO: 3651 - RNA, 19 nt, Artificial Sequence
  Synthetic
cgaauucuuuggagaggaa

SEQ ID NO: 3652 - RNA, 19 nt, Artificial Sequence
  Synthetic
ugaaaucccugaugaggaa

SEQ ID NO: 3653 - RNA, 19 nt, Artificial Sequence
  Synthetic
ccacagaucuggagguaug

SEQ ID NO: 3654 - RNA, 19 nt, Artificial Sequence
  Synthetic
cgugauauugcuacagaaa

SEQ ID NO: 3655 - RNA, 19 nt, Artificial Sequence
  Synthetic
gagagaaagaauaugucaa

SEQ ID NO: 3656 - RNA, 19 nt, Artificial Sequence
  Synthetic
gccagaaagugaucacaaa

SEQ ID NO: 3657 - RNA, 19 nt, Artificial Sequence
  Synthetic
cuaugaauuuggacaagaa

SEQ ID NO: 3658 - RNA, 19 nt, Artificial Sequence
  Synthetic
cuucagauguguucaagaa

SEQ ID NO: 3659 - RNA, 19 nt, Artificial Sequence
  Synthetic
ggaagggucuauugcagaa

SEQ ID NO: 3660 - RNA, 19 nt, Artificial Sequence
  Synthetic
auuccaaagccaaguauaa

SEQ ID NO: 3661 - RNA, 19 nt, Artificial Sequence
  Synthetic
cuagagagguugagugaau

SEQ ID NO: 3662 - RNA, 19 nt, Artificial Sequence
  Synthetic
ccaaugauacccagagcua

SEQ ID NO: 3663 - RNA, 19 nt, Artificial Sequence
  Synthetic
aggaagugcugcuguaauu

SEQ ID NO: 3664 - RNA, 19 nt, Artificial Sequence
  Synthetic
ccucagaacucuugcucuu

SEQ ID NO: 3665 - RNA, 19 nt, Artificial Sequence
  Synthetic
ggaaauggaugcuauucua

SEQ ID NO: 3666 - RNA, 19 nt, Artificial Sequence
  Synthetic
ggaugaaacuauugaagac

SEQ ID NO: 3667 - RNA, 19 nt, Artificial Sequence
  Synthetic
ggugagggaugauuguaaa

SEQ ID NO: 3668 - RNA, 19 nt, Artificial Sequence
  Synthetic
gcuuacagauucaugguuu

SEQ ID NO: 3669 - RNA, 19 nt, Artificial Sequence
  Synthetic
gagaaagguaaguccauuu

SEQ ID NO: 3670 - RNA, 19 nt, Artificial Sequence
  Synthetic
gggaugaaacuauugaaga

SEQ ID NO: 3671 - RNA, 19 nt, Artificial Sequence
  Synthetic
guuauaaggccuugucuuu

SEQ ID NO: 3672 - RNA, 19 nt, Artificial Sequence
  Synthetic
ccuaagagccacugaguug

SEQ ID NO: 3673 - RNA, 19 nt, Artificial Sequence
  Synthetic
acagauucaugguuugaua

SEQ ID NO: 3674 - RNA, 19 nt, Artificial Sequence
  Synthetic
gcugaaagaccaagacucu

SEQ ID NO: 3675 - RNA, 19 nt, Artificial Sequence
  Synthetic
gccauuaagugucuguuua

SEQ ID NO: 3676 - RNA, 19 nt, Artificial Sequence
  Synthetic
aagaggaagugcugcugua

SEQ ID NO: 3677 - RNA, 19 nt, Artificial Sequence
  Synthetic
gcauuugugaauugcuuua

SEQ ID NO: 3678 - RNA, 19 nt, Artificial Sequence
  Synthetic
ccaccuagccauagucuca

SEQ ID NO: 3679 - RNA, 19 nt, Artificial Sequence
  Synthetic
ccaguuucaccguguguua

SEQ ID NO: 3680 - RNA, 19 nt, Artificial Sequence
  Synthetic
gcucuaagcugacugaguu

SEQ ID NO: 3681 - RNA, 19 nt, Artificial Sequence
  Synthetic
guguagggaugaaacuauu

SEQ ID NO: 3682 - RNA, 19 nt, Artificial Sequence
  Synthetic
gauuaaggccacaggauaa

SEQ ID NO: 3683 - RNA, 19 nt, Artificial Sequence
  Synthetic
ggccaagagugucgugaaa

SEQ ID NO: 3684 - RNA, 19 nt, Artificial Sequence
  Synthetic
cgauuaaggccacaggaua

SEQ ID NO: 3685 - RNA, 19 nt, Artificial Sequence
  Synthetic
cgacugauauugauguuaa

SEQ ID NO: 3686 - RNA, 19 nt, Artificial Sequence
  Synthetic
ccuuaaagcuaaugaauac

SEQ ID NO: 3687 - RNA, 19 nt, Artificial Sequence
  Synthetic
guacacagucuaugcauua

SEQ ID NO: 3688 - RNA, 19 nt, Artificial Sequence
  Synthetic
agacuuugcuagagauuga

SEQ ID NO: 3689 - RNA, 19 nt, Artificial Sequence
  Synthetic
aggaugaccuggcaaauaa

SEQ ID NO: 3690 - RNA, 19 nt, Artificial Sequence
  Synthetic
ucacaggugucuugaaaca

SEQ ID NO: 3691 - RNA, 19 nt, Artificial Sequence
  Synthetic
uuuaacagcuugaggacuu

SEQ ID NO: 3692 - RNA, 19 nt, Artificial Sequence
  Synthetic
caaucaagcugccugcaaa

SEQ ID NO: 3693 - RNA, 19 nt, Artificial Sequence
  Synthetic
uuucaaagugccagaauuu

SEQ ID NO: 3694 - RNA, 19 nt, Artificial Sequence
  Synthetic
ccacaaugcucaaaaugaa

SEQ ID NO: 3695 - RNA, 19 nt, Artificial Sequence
  Synthetic
caaaagagagugauagaau

SEQ ID NO: 3696 - RNA, 19 nt, Artificial Sequence
  Synthetic
ugaccaagauccaagcaau

SEQ ID NO: 3697 - RNA, 19 nt, Artificial Sequence
  Synthetic
guguguagucucuugguua

SEQ ID NO: 3698 - RNA, 19 nt, Artificial Sequence
  Synthetic
guucaauucucauguugua

SEQ ID NO: 3699 - RNA, 19 nt, Artificial Sequence
  Synthetic
gcccagaccaguugaauga

SEQ ID NO: 3700 - RNA, 19 nt, Artificial Sequence
  Synthetic
uggcaauucucaaaugauu

SEQ ID NO: 3701 - RNA, 19 nt, Artificial Sequence
  Synthetic
uguguagucucuugguuaa

SEQ ID NO: 3702 - RNA, 19 nt, Artificial Sequence
  Synthetic
ccgauuuccuaauguaauu

SEQ ID NO: 3703 - RNA, 19 nt, Artificial Sequence
  Synthetic
ucagauggccugugggaca

SEQ ID NO: 3704 - RNA, 19 nt, Artificial Sequence
  Synthetic
guaaagaguugcagcgcag

SEQ ID NO: 3705 - RNA, 19 nt, Artificial Sequence
  Synthetic
gcgaggauguacagggaug

SEQ ID NO: 3706 - RNA, 19 nt, Artificial Sequence
  Synthetic
ggacgaucaucauggagga

SEQ ID NO: 3707 - RNA, 19 nt, Artificial Sequence
  Synthetic
cuugauuugcacauggaaa

SEQ ID NO: 3708 - RNA, 19 nt, Artificial Sequence
  Synthetic
caaauucaguguugcgguu

SEQ ID NO: 3709 - RNA, 19 nt, Artificial Sequence
  Synthetic
gcccaagcagugagcgaga

SEQ ID NO: 3710 - RNA, 19 nt, Artificial Sequence
  Synthetic
cugaaguggaguaaagagu

SEQ ID NO: 3711 - RNA, 19 nt, Artificial Sequence
  Synthetic
auggagggagcuauggaaa

SEQ ID NO: 3712 - RNA, 19 nt, Artificial Sequence
  Synthetic
ugugcaaagccuacagaca

SEQ ID NO: 3713 - RNA, 19 nt, Artificial Sequence
  Synthetic
ccuugaaagcagaguccca

SEQ ID NO: 3714 - RNA, 19 nt, Artificial Sequence
  Synthetic
cuuaaauucuacaaggaac

SEQ ID NO: 3715 - RNA, 19 nt, Artificial Sequence
  Synthetic
ggcugaggccccaggauaa

SEQ ID NO: 3716 - RNA, 19 nt, Artificial Sequence
  Synthetic
uggaaaugggacuaagcau

SEQ ID NO: 3717 - RNA, 19 nt, Artificial Sequence
  Synthetic
ccacaaagcucacacgaua

SEQ ID NO: 3718 - RNA, 19 nt, Artificial Sequence
  Synthetic
gggaaaagguucuggaaga

SEQ ID NO: 3719 - RNA, 19 nt, Artificial Sequence
  Synthetic
ccggacagguaguaagaua

SEQ ID NO: 3720 - RNA, 19 nt, Artificial Sequence
  Synthetic
ggagaugaccuaugaagaa

SEQ ID NO: 3721 - RNA, 19 nt, Artificial Sequence
  Synthetic
gggagaagccugagaaugu

SEQ ID NO: 3722 - RNA, 19 nt, Artificial Sequence
  Synthetic
augaagaaauccaggaaca

SEQ ID NO: 3723 - RNA, 19 nt, Artificial Sequence
  Synthetic
uaaagagaauugagugcua

SEQ ID NO: 3724 - RNA, 19 nt, Artificial Sequence
  Synthetic
gacgagaggcagugagcua

SEQ ID NO: 3725 - RNA, 19 nt, Artificial Sequence
  Synthetic
gcuacaagaacuaugaauu

SEQ ID NO: 3726 - RNA, 19 nt, Artificial Sequence
  Synthetic
uggccuauuuccuggauaa

SEQ ID NO: 3727 - RNA, 19 nt, Artificial Sequence
  Synthetic
aagaaauccaggaacauua

SEQ ID NO: 3728 - RNA, 19 nt, Artificial Sequence
  Synthetic
aaacaucaggcaagugaaa

SEQ ID NO: 3729 - RNA, 19 nt, Artificial Sequence
  Synthetic
gagaugaccuaugaagaaa

SEQ ID NO: 3730 - RNA, 19 nt, Artificial Sequence
  Synthetic
gauaggaacaccaacuaaa

SEQ ID NO: 3731 - RNA, 19 nt, Artificial Sequence
  Synthetic
gaacaugguuacaaggugu

SEQ ID NO: 3732 - RNA, 19 nt, Artificial Sequence
  Synthetic
gauaauggagcuagaacga

SEQ ID NO: 3733 - RNA, 19 nt, Artificial Sequence
  Synthetic
ggaacauuacccugaagaa

SEQ ID NO: 3734 - RNA, 19 nt, Artificial Sequence
  Synthetic
ucuacuaccucaugaauau

SEQ ID NO: 3735 - RNA, 19 nt, Artificial Sequence
  Synthetic
cuaucuagcucuggaggaa

SEQ ID NO: 3736 - RNA, 19 nt, Artificial Sequence
  Synthetic
gcucgaggcaagaccuaua

SEQ ID NO: 3737 - RNA, 19 nt, Artificial Sequence
  Synthetic
cagugauaauggagcuaga

SEQ ID NO: 3738 - RNA, 19 nt, Artificial Sequence
  Synthetic
uggugaucaugguggguuu

SEQ ID NO: 3739 - RNA, 19 nt, Artificial Sequence
  Synthetic
cgacauggcgagagugaac

SEQ ID NO: 3740 - RNA, 19 nt, Artificial Sequence
  Synthetic
gaacauuacccugaagaau

SEQ ID NO: 3741 - RNA, 19 nt, Artificial Sequence
  Synthetic
ggauaggaacaccaacuaa

SEQ ID NO: 3742 - RNA, 19 nt, Artificial Sequence
  Synthetic
uaauggagcuagaacgaca

SEQ ID NO: 3743 - RNA, 19 nt, Artificial Sequence
  Synthetic
acugcgagaccaagauaaa

SEQ ID NO: 3744 - RNA, 19 nt, Artificial Sequence
  Synthetic
caacacuaccagagaacga

SEQ ID NO: 3745 - RNA, 19 nt, Artificial Sequence
  Synthetic
uuguaaugacccuggcaua

SEQ ID NO: 3746 - RNA, 19 nt, Artificial Sequence
  Synthetic
aguggaaggcccugaauga

SEQ ID NO: 3747 - RNA, 19 nt, Artificial Sequence
  Synthetic
ggaaauuucuggaggaaca

SEQ ID NO: 3748 - RNA, 19 nt, Artificial Sequence
  Synthetic
ccaauauucuggagguuaa

SEQ ID NO: 3749 - RNA, 19 nt, Artificial Sequence
  Synthetic
acacagaacaugagguuau

SEQ ID NO: 3750 - RNA, 19 nt, Artificial Sequence
  Synthetic
ccugaaaggaacagagaga

SEQ ID NO: 3751 - RNA, 19 nt, Artificial Sequence
  Synthetic
uggccuacuucuuggauaa

SEQ ID NO: 3752 - RNA, 19 nt, Artificial Sequence
  Synthetic
ccucagaacagaacaacaa

SEQ ID NO: 3753 - RNA, 19 nt, Artificial Sequence
  Synthetic
gaacuuugcugaacagaau

SEQ ID NO: 3754 - RNA, 19 nt, Artificial Sequence
  Synthetic
ggaaauaacagaccucaaa

SEQ ID NO: 3755 - RNA, 19 nt, Artificial Sequence
  Synthetic
ugcccaagcucuaaggaaa

SEQ ID NO: 3756 - RNA, 19 nt, Artificial Sequence
  Synthetic
ggugcaaaguggaaacaau

SEQ ID NO: 3757 - RNA, 19 nt, Artificial Sequence
  Synthetic
aggacuacauccagagcaa

SEQ ID NO: 3758 - RNA, 19 nt, Artificial Sequence
  Synthetic
gggacaugauuuugaacuu

SEQ ID NO: 3759 - RNA, 19 nt, Artificial Sequence
  Synthetic
caauaaggcguccaagaaa

SEQ ID NO: 3760 - RNA, 19 nt, Artificial Sequence
  Synthetic
ccaagaaacuaacacgcua

SEQ ID NO: 3761 - RNA, 19 nt, Artificial Sequence
  Synthetic
gagagaacgugauggagga

SEQ ID NO: 3762 - RNA, 19 nt, Artificial Sequence
  Synthetic
gcaaaguggaaacaauuaa

SEQ ID NO: 3763 - RNA, 19 nt, Artificial Sequence
  Synthetic
gugcaaaguggaaacaauu

SEQ ID NO: 3764 - RNA, 19 nt, Artificial Sequence
  Synthetic
gagaauugaaugcuacaaa

SEQ ID NO: 3765 - RNA, 19 nt, Artificial Sequence
  Synthetic
ugaagagaauugaaugcua

SEQ ID NO: 3766 - RNA, 19 nt, Artificial Sequence
  Synthetic
guaaggaugagaaggaaca

SEQ ID NO: 3767 - RNA, 19 nt, Artificial Sequence
  Synthetic
agaacgugauggaggacuu

SEQ ID NO: 3768 - RNA, 19 nt, Artificial Sequence
  Synthetic
augagaaggaacagcuuua

SEQ ID NO: 3769 - RNA, 19 nt, Artificial Sequence
  Synthetic
aauaaggcguccaagaaau

SEQ ID NO: 3770 - RNA, 19 nt, Artificial Sequence
  Synthetic
cuaugcagagauugagaaa

SEQ ID NO: 3771 - RNA, 19 nt, Artificial Sequence
  Synthetic
gcccaagcucuaaggaaau

SEQ ID NO: 3772 - RNA, 19 nt, Artificial Sequence
  Synthetic
gugaagaggaccauacaga

SEQ ID NO: 3773 - RNA, 19 nt, Artificial Sequence
  Synthetic
ugaaaggaacagagagaac

SEQ ID NO: 3774 - RNA, 19 nt, Artificial Sequence
  Synthetic
ccuguaaggaugagaagga

SEQ ID NO: 3775 - RNA, 19 nt, Artificial Sequence
  Synthetic
ccaagaaauuacaguguug

SEQ ID NO: 3776 - RNA, 19 nt, Artificial Sequence
  Synthetic
uguagaagcuguagagaua

SEQ ID NO: 3777 - RNA, 19 nt, Artificial Sequence
  Synthetic
ucucaaagcuugugccaaa

SEQ ID NO: 3778 - RNA, 19 nt, Artificial Sequence
  Synthetic
gggcaaagcucuuccauuu

SEQ ID NO: 3779 - RNA, 19 nt, Artificial Sequence
  Synthetic
gaauuaaugaccugggaua

SEQ ID NO: 3780 - RNA, 19 nt, Artificial Sequence
  Synthetic
ugaaauacauggacgaaaa

SEQ ID NO: 3781 - RNA, 19 nt, Artificial Sequence
  Synthetic
ccaauaucauggaaguuaa

SEQ ID NO: 3782 - RNA, 19 nt, Artificial Sequence
  Synthetic
ggucagaggaugcaaagaa

SEQ ID NO: 3783 - RNA, 19 nt, Artificial Sequence
  Synthetic
cggcagaagccauggacga

SEQ ID NO: 3784 - RNA, 19 nt, Artificial Sequence
  Synthetic
uuagauagggagagaggua

SEQ ID NO: 3785 - RNA, 19 nt, Artificial Sequence
  Synthetic
ggagagagguaacaugaau

SEQ ID NO: 3786 - RNA, 19 nt, Artificial Sequence
  Synthetic
gggcuuagauagggagaga

SEQ ID NO: 3787 - RNA, 19 nt, Artificial Sequence
  Synthetic
ggugagggugggagauuua

SEQ ID NO: 3788 - RNA, 19 nt, Artificial Sequence
  Synthetic
caggagaugccuucagaaa

SEQ ID NO: 3789 - RNA, 19 nt, Artificial Sequence
  Synthetic
acaccuacccugaggagua

SEQ ID NO: 3790 - RNA, 19 nt, Artificial Sequence
  Synthetic
ggugcaugauugugcuuaa

SEQ ID NO: 3791 - RNA, 19 nt, Artificial Sequence
  Synthetic
ccuaguugcugaaaguuaa

SEQ ID NO: 3792 - RNA, 19 nt, Artificial Sequence
  Synthetic
ggauaagagugcagaggag

SEQ ID NO: 3793 - RNA, 19 nt, Artificial Sequence
  Synthetic
gcaaguucguggaggagca

SEQ ID NO: 3794 - RNA, 19 nt, Artificial Sequence
  Synthetic
gugcagaggagaugcccua

SEQ ID NO: 3795 - RNA, 19 nt, Artificial Sequence
  Synthetic
ccaagaagcugacucgcua

SEQ ID NO: 3796 - RNA, 19 nt, Artificial Sequence
  Synthetic
gagaagagccguugcuguu

SEQ ID NO: 3797 - RNA, 19 nt, Artificial Sequence
  Synthetic
gaacugaggcugugcuuca

SEQ ID NO: 3798 - RNA, 19 nt, Artificial Sequence
  Synthetic
uugccuacuuccuggauaa

SEQ ID NO: 3799 - RNA, 19 nt, Artificial Sequence
  Synthetic
gggagcaggacaaguacua

SEQ ID NO: 3800 - RNA, 19 nt, Artificial Sequence
  Synthetic
cuucagaaagcuuuguaua

SEQ ID NO: 3801 - RNA, 19 nt, Artificial Sequence
  Synthetic
gcuuggagccagugaucau

SEQ ID NO: 3802 - RNA, 19 nt, Artificial Sequence
  Synthetic
ccucggagaccuucacaaa

SEQ ID NO: 3803 - RNA, 19 nt, Artificial Sequence
  Synthetic
accaauacuacuagagaga

SEQ ID NO: 3804 - RNA, 19 nt, Artificial Sequence
  Synthetic
gaugaaaccauuuggaaac

SEQ ID NO: 3805 - RNA, 19 nt, Artificial Sequence
  Synthetic
ugagcaaguucguggagga

SEQ ID NO: 3806 - RNA, 19 nt, Artificial Sequence
  Synthetic
acgaggaaauucaggauaa

SEQ ID NO: 3807 - RNA, 19 nt, Artificial Sequence
  Synthetic
ccuacaaugugaaaggaaa

SEQ ID NO: 3808 - RNA, 19 nt, Artificial Sequence
  Synthetic
ggaaaugaccuacgaggaa

SEQ ID NO: 3809 - RNA, 19 nt, Artificial Sequence
  Synthetic
ccaagaagcugacucgaua

SEQ ID NO: 3810 - RNA, 19 nt, Artificial Sequence
  Synthetic
ccgcaugggcugaggugua

SEQ ID NO: 3811 - RNA, 19 nt, Artificial Sequence
  Synthetic
gaaacaugcauuugccaua

SEQ ID NO: 3812 - RNA, 19 nt, Artificial Sequence
  Synthetic
caacaucgugcaagugaaa

SEQ ID NO: 3813 - RNA, 19 nt, Artificial Sequence
  Synthetic
cagcauucuuugcaauaaa

SEQ ID NO: 3814 - RNA, 19 nt, Artificial Sequence
  Synthetic
gcacgugagucuggugaaa

SEQ ID NO: 3815 - RNA, 19 nt, Artificial Sequence
  Synthetic
gggcugagguguagcugau

SEQ ID NO: 3816 - RNA, 19 nt, Artificial Sequence
  Synthetic
gaucugaaggucuggacaa

SEQ ID NO: 3817 - RNA, 19 nt, Artificial Sequence
  Synthetic
gaaaugaccuacgaggaaa

SEQ ID NO: 3818 - RNA, 19 nt, Artificial Sequence
  Synthetic
agccagaugaagaggacaa

SEQ ID NO: 3819 - RNA, 19 nt, Artificial Sequence
  Synthetic
ggagaaggcagaacccaua

SEQ ID NO: 3820 - RNA, 19 nt, Artificial Sequence
  Synthetic
gggcauucaugaaagcaau

SEQ ID NO: 3821 - RNA, 19 nt, Artificial Sequence
  Synthetic
guucaauguuggccaguau

SEQ ID NO: 3822 - RNA, 19 nt, Artificial Sequence
  Synthetic
ucauggagcuggagaggca

SEQ ID NO: 3823 - RNA, 19 nt, Artificial Sequence
  Synthetic
acauugggaugcacagaaa

SEQ ID NO: 3824 - RNA, 19 nt, Artificial Sequence
  Synthetic
cagaauggaugguauugaa

SEQ ID NO: 3825 - RNA, 19 nt, Artificial Sequence
  Synthetic
uggacaagccagaugaaga

SEQ ID NO: 3826 - RNA, 19 nt, Artificial Sequence
  Synthetic
gcuggagaggcaagagaau

SEQ ID NO: 3827 - RNA, 19 nt, Artificial Sequence
  Synthetic
ggaaagugcuugcugugau

SEQ ID NO: 3828 - RNA, 19 nt, Artificial Sequence
  Synthetic
cauuaggacugcagccuuu

SEQ ID NO: 3829 - RNA, 19 nt, Artificial Sequence
  Synthetic
gcauugagugcuaugagaa

SEQ ID NO: 3830 - RNA, 19 nt, Artificial Sequence
  Synthetic
guauauuaccucaugaaca

SEQ ID NO: 3831 - RNA, 19 nt, Artificial Sequence
  Synthetic
caaugaagagggccugaaa

SEQ ID NO: 3832 - RNA, 19 nt, Artificial Sequence
  Synthetic
cgaggaaauucaggauaau

SEQ ID NO: 3833 - RNA, 19 nt, Artificial Sequence
  Synthetic
aagaagaucuggaugccau

SEQ ID NO: 3834 - RNA, 19 nt, Artificial Sequence
  Synthetic
gaacagaauggcuacaaga

SEQ ID NO: 3835 - RNA, 19 nt, Artificial Sequence
  Synthetic
ggacaauccagacggcuga

SEQ ID NO: 3836 - RNA, 19 nt, Artificial Sequence
  Synthetic
acaagaagauucacgugua

SEQ ID NO: 3837 - RNA, 19 nt, Artificial Sequence
  Synthetic
ccacagaauuaaacguguu

SEQ ID NO: 3838 - RNA, 19 nt, Artificial Sequence
  Synthetic
uagccuggccacagaauua

SEQ ID NO: 3839 - RNA, 19 nt, Artificial Sequence
  Synthetic
gcuacaagugggcugagua

SEQ ID NO: 3840 - RNA, 19 nt, Artificial Sequence
  Synthetic
ggacgcagagggcaaggaa

SEQ ID NO: 3841 - RNA, 19 nt, Artificial Sequence
  Synthetic
gaagcaaggcugcgacugu

SEQ ID NO: 3842 - RNA, 19 nt, Artificial Sequence
  Synthetic
caagaagauucacguguac

SEQ ID NO: 3843 - RNA, 19 nt, Artificial Sequence
  Synthetic
gauuccacguuuccuuuaa

SEQ ID NO: 3844 - RNA, 19 nt, Artificial Sequence
  Synthetic
ggaacuggauugcgauugg

SEQ ID NO: 3845 - RNA, 19 nt, Artificial Sequence
  Synthetic
gcgcaucucccaccagagu

SEQ ID NO: 3846 - RNA, 19 nt, Artificial Sequence
  Synthetic
ggcuaacgacggcuacuga

SEQ ID NO: 3847 - RNA, 19 nt, Artificial Sequence
  Synthetic
gauuucaucaccacccauu

SEQ ID NO: 3848 - RNA, 19 nt, Artificial Sequence
  Synthetic
gcccagcacgccauuucaa

SEQ ID NO: 3849 - RNA, 19 nt, Artificial Sequence
  Synthetic
cgauuccacguuuccuuua

SEQ ID NO: 3850 - RNA, 19 nt, Artificial Sequence
  Synthetic
cuucuccguuggcugauuu

SEQ ID NO: 3851 - RNA, 19 nt, Artificial Sequence
  Synthetic
gaaaaucaaagccaaguac

SEQ ID NO: 3852 - RNA, 19 nt, Artificial Sequence
  Synthetic
ccgauuccacguuuccuuu

SEQ ID NO: 3853 - RNA, 19 nt, Artificial Sequence
  Synthetic
caagugggcugaguaccau

SEQ ID NO: 3854 - RNA, 19 nt, Artificial Sequence
  Synthetic
ggacaucuacgacaaagug

SEQ ID NO: 3855 - RNA, 19 nt, Artificial Sequence
  Synthetic
ggaccucgcucucauuccu

SEQ ID NO: 3856 - RNA, 19 nt, Artificial Sequence
  Synthetic
gcggacaucuacgacaaag

SEQ ID NO: 3857 - RNA, 19 nt, Artificial Sequence
  Synthetic
cauucccgauuccacguuu

SEQ ID NO: 3858 - RNA, 19 nt, Artificial Sequence
  Synthetic
gaacuggauugcgauuggu

SEQ ID NO: 3859 - RNA, 19 nt, Artificial Sequence
  Synthetic
uccguuggcugauuucauc

SEQ ID NO: 3860 - RNA, 19 nt, Artificial Sequence
  Synthetic
caccacccauucccgauuc

SEQ ID NO: 3861 - RNA, 19 nt, Artificial Sequence
  Synthetic
cugcagagagcaaggagau

SEQ ID NO: 3862 - RNA, 19 nt, Artificial Sequence
  Synthetic
agauucacguguacggcua

SEQ ID NO: 3863 - RNA, 19 nt, Artificial Sequence
  Synthetic
augcggacaucuacgacaa

SEQ ID NO: 3864 - RNA, 19 nt, Artificial Sequence
  Synthetic
cugagaaaaucaaagccaa

SEQ ID NO: 3865 - RNA, 19 nt, Artificial Sequence
  Synthetic
gcucagagggagaggauga

SEQ ID NO: 3866 - RNA, 19 nt, Artificial Sequence
  Synthetic
gcuuauaccggguggguuu

SEQ ID NO: 3867 - RNA, 19 nt, Artificial Sequence
  Synthetic
gggagaaggaccagcucaa

SEQ ID NO: 3868 - RNA, 19 nt, Artificial Sequence
  Synthetic
gguaacauucagugaggaa

SEQ ID NO: 3869 - RNA, 19 nt, Artificial Sequence
  Synthetic
gcaaggacuauguggcuua

SEQ ID NO: 3870 - RNA, 19 nt, Artificial Sequence
  Synthetic
augaagauguggaugggaa

SEQ ID NO: 3871 - RNA, 19 nt, Artificial Sequence
  Synthetic
ccauaggguugcaggaagu

SEQ ID NO: 3872 - RNA, 19 nt, Artificial Sequence
  Synthetic
gcaccagcucagagggaga

SEQ ID NO: 3873 - RNA, 19 nt, Artificial Sequence
  Synthetic
gagacuucauccugggcua

SEQ ID NO: 3874 - RNA, 19 nt, Artificial Sequence
  Synthetic
gugagguaccgcauggaaa

SEQ ID NO: 3875 - RNA, 19 nt, Artificial Sequence
  Synthetic
cggugaggaugcagggugu

SEQ ID NO: 3876 - RNA, 19 nt, Artificial Sequence
  Synthetic
gguaccaacaaauacgaua

SEQ ID NO: 3877 - RNA, 19 nt, Artificial Sequence
  Synthetic
ggucauccauuaggaauua

SEQ ID NO: 3878 - RNA, 19 nt, Artificial Sequence
  Synthetic
cgauaccagugccaagaaa

SEQ ID NO: 3879 - RNA, 19 nt, Artificial Sequence
  Synthetic
ugaagauguggaugggaau

SEQ ID NO: 3880 - RNA, 19 nt, Artificial Sequence
  Synthetic
gaagauguggaugggaaua

SEQ ID NO: 3881 - RNA, 19 nt, Artificial Sequence
  Synthetic
gcgcagacaugaucgccau

SEQ ID NO: 3882 - RNA, 19 nt, Artificial Sequence
  Synthetic
gcaccucaacugugacaau

SEQ ID NO: 3883 - RNA, 19 nt, Artificial Sequence
  Synthetic
aagacaacuuccagaccau

SEQ ID NO: 3884 - RNA, 19 nt, Artificial Sequence
  Synthetic
uggaauacacagucagcga

SEQ ID NO: 3885 - RNA, 19 nt, Artificial Sequence
  Synthetic
ugauguggguaccaacaaa

SEQ ID NO: 3886 - RNA, 19 nt, Artificial Sequence
  Synthetic
cggagcagcgcaaagacaa

SEQ ID NO: 3887 - RNA, 19 nt, Artificial Sequence
  Synthetic
gaagugaacuccaugcuca

SEQ ID NO: 3888 - RNA, 19 nt, Artificial Sequence
  Synthetic
gagaaggaccagcucaaca

SEQ ID NO: 3889 - RNA, 19 nt, Artificial Sequence
  Synthetic
ggagugagcuguucaugga

SEQ ID NO: 3890 - RNA, 19 nt, Artificial Sequence
  Synthetic
caacugugacaaucagcaa

SEQ ID NO: 3891 - RNA, 19 nt, Artificial Sequence
  Synthetic
ggcuggagguggcagauga

SEQ ID NO: 3892 - RNA, 19 nt, Artificial Sequence
  Synthetic
cuggcaaguccaagcgaca

SEQ ID NO: 3893 - RNA, 19 nt, Artificial Sequence
  Synthetic
agcaggcgguggugaggua

SEQ ID NO: 3894 - RNA, 19 nt, Artificial Sequence
  Synthetic
cagcuuggacagaccguau

SEQ ID NO: 3895 - RNA, 19 nt, Artificial Sequence
  Synthetic
gaucuaagguugaacguaa

SEQ ID NO: 3896 - RNA, 19 nt, Artificial Sequence
  Synthetic
ccgaaguauuggagaaauu

SEQ ID NO: 3897 - RNA, 19 nt, Artificial Sequence
  Synthetic
ggaggaacuugaagaaauu

SEQ ID NO: 3898 - RNA, 19 nt, Artificial Sequence
  Synthetic
aagaagagcugaagaggau

SEQ ID NO: 3899 - RNA, 19 nt, Artificial Sequence
  Synthetic
gggccaaggagaaggagaa

SEQ ID NO: 3900 - RNA, 19 nt, Artificial Sequence
  Synthetic
gugaauaacuucugugaca

SEQ ID NO: 3901 - RNA, 19 nt, Artificial Sequence
  Synthetic
gggaauaagcugaaagcca

SEQ ID NO: 3902 - RNA, 19 nt, Artificial Sequence
  Synthetic
caucaugagcugugaagaa

SEQ ID NO: 3903 - RNA, 19 nt, Artificial Sequence
  Synthetic
caauaagcuuggugaucua

SEQ ID NO: 3904 - RNA, 19 nt, Artificial Sequence
  Synthetic
cggcauggcuuccgagauu

SEQ ID NO: 3905 - RNA, 19 nt, Artificial Sequence
  Synthetic
uggaggaacuugaagaaau

SEQ ID NO: 3906 - RNA, 19 nt, Artificial Sequence
  Synthetic
ccaaggagaaggagaaaca

SEQ ID NO: 3907 - RNA, 19 nt, Artificial Sequence
  Synthetic
ggaauaagcugaaagccau

SEQ ID NO: 3908 - RNA, 19 nt, Artificial Sequence
  Synthetic
cagugaacauggugaucaa

SEQ ID NO: 3909 - RNA, 19 nt, Artificial Sequence
  Synthetic
ccgaagagacaaacaguau

SEQ ID NO: 3910 - RNA, 19 nt, Artificial Sequence
  Synthetic
uggcgaaacuggaggaacu

SEQ ID NO: 3911 - RNA, 19 nt, Artificial Sequence
  Synthetic
agcuagaaguuuuggauau

SEQ ID NO: 3912 - RNA, 19 nt, Artificial Sequence
  Synthetic
gaagaggaggucaaagaaa

SEQ ID NO: 3913 - RNA, 19 nt, Artificial Sequence
  Synthetic
gcuacaggcuuuaagaaaa

SEQ ID NO: 3914 - RNA, 19 nt, Artificial Sequence
  Synthetic
ggauauuggccauaaucaa

SEQ ID NO: 3915 - RNA, 19 nt, Artificial Sequence
  Synthetic
cccuggaacuacugaauaa

SEQ ID NO: 3916 - RNA, 19 nt, Artificial Sequence
  Synthetic
cugcugaguuggagaacau

SEQ ID NO: 3917 - RNA, 19 nt, Artificial Sequence
  Synthetic
gccgaaagcuagaaguuuu

SEQ ID NO: 3918 - RNA, 19 nt, Artificial Sequence
  Synthetic
ucaaagaaaucaugaagca

SEQ ID NO: 3919 - RNA, 19 nt, Artificial Sequence
  Synthetic
aagaggaggucaaagaaau

SEQ ID NO: 3920 - RNA, 19 nt, Artificial Sequence
  Synthetic
aagaagaauacauggucaa

SEQ ID NO: 3921 - RNA, 19 nt, Artificial Sequence
  Synthetic
cugaaaggcuagaaagaac

SEQ ID NO: 3922 - RNA, 19 nt, Artificial Sequence
  Synthetic
ccagugaaccgauggacaa

SEQ ID NO: 3923 - RNA, 19 nt, Artificial Sequence
  Synthetic
ggcuacaggcuuuaagaaa

SEQ ID NO: 3924 - RNA, 19 nt, Artificial Sequence
  Synthetic
gguugaacguaauuaggaa

SEQ ID NO: 3925 - RNA, 19 nt, Artificial Sequence
  Synthetic
ggaaggaaucauagaggaa

SEQ ID NO: 3926 - RNA, 19 nt, Artificial Sequence
  Synthetic
ggccaaagccuauggaauu

SEQ ID NO: 3927 - RNA, 19 nt, Artificial Sequence
  Synthetic
auguagaaguagagaauga

SEQ ID NO: 3928 - RNA, 19 nt, Artificial Sequence
  Synthetic
ggucaagaauccugaagau

SEQ ID NO: 3929 - RNA, 19 nt, Artificial Sequence
  Synthetic
cugcagaaacaauggcaaa

SEQ ID NO: 3930 - RNA, 19 nt, Artificial Sequence
  Synthetic
gcgaagucauggugaaaca

SEQ ID NO: 3931 - RNA, 19 nt, Artificial Sequence
  Synthetic
cauggaagauguagaagua

SEQ ID NO: 3932 - RNA, 19 nt, Artificial Sequence
  Synthetic
agaagaagaagaugaggaa

SEQ ID NO: 3933 - RNA, 19 nt, Artificial Sequence
  Synthetic
gcgaaugggcccuggaaga

SEQ ID NO: 3934 - RNA, 19 nt, Artificial Sequence
  Synthetic
aggaagaagaagaagauga

SEQ ID NO: 3935 - RNA, 19 nt, Artificial Sequence
  Synthetic
agauguagaaguagagaau

SEQ ID NO: 3936 - RNA, 19 nt, Artificial Sequence
  Synthetic
ucuauaagcaagaggaaaa

SEQ ID NO: 3937 - RNA, 19 nt, Artificial Sequence
  Synthetic
aaucauagaggaagaagaa

SEQ ID NO: 3938 - RNA, 19 nt, Artificial Sequence
  Synthetic
ggguaaagccuccagauuu

SEQ ID NO: 3939 - RNA, 19 nt, Artificial Sequence
  Synthetic
caaacagugugaaggaauu

SEQ ID NO: 3940 - RNA, 19 nt, Artificial Sequence
  Synthetic
ggagaauugaacuggcaaa

SEQ ID NO: 3941 - RNA, 19 nt, Artificial Sequence
  Synthetic
ucauagaggaagaagaaga

SEQ ID NO: 3942 - RNA, 19 nt, Artificial Sequence
  Synthetic
gcuauugaauggaguguga

SEQ ID NO: 3943 - RNA, 19 nt, Artificial Sequence
  Synthetic
cuuaauagcaugcagaauu

SEQ ID NO: 3944 - RNA, 19 nt, Artificial Sequence
  Synthetic
gaaugaaacuggcaaggau

SEQ ID NO: 3945 - RNA, 19 nt, Artificial Sequence
  Synthetic
aagaugacauggagaccaa

SEQ ID NO: 3946 - RNA, 19 nt, Artificial Sequence
  Synthetic
uggaagauguagaaguaga

SEQ ID NO: 3947 - RNA, 19 nt, Artificial Sequence
  Synthetic
aaggaaucauagaggaaga

SEQ ID NO: 3948 - RNA, 19 nt, Artificial Sequence
  Synthetic
aaucuauaguggaaggaau

SEQ ID NO: 3949 - RNA, 19 nt, Artificial Sequence
  Synthetic
ccaagaaagaccauccaua

SEQ ID NO: 3950 - RNA, 19 nt, Artificial Sequence
  Synthetic
caugauugauguuguagaa

SEQ ID NO: 3951 - RNA, 19 nt, Artificial Sequence
  Synthetic
guggauagcaucacaagaa

SEQ ID NO: 3952 - RNA, 19 nt, Artificial Sequence
  Synthetic
cauagaggaagaagaagaa

SEQ ID NO: 3953 - RNA, 19 nt, Artificial Sequence
  Synthetic
aaacaaaggucaagaaucc

SEQ ID NO: 3954 - RNA, 19 nt, Artificial Sequence
  Synthetic
gaaucauagaggaagaaga

SEQ ID NO: 3955 - RNA, 19 nt, Artificial Sequence
  Synthetic
gcgcagaggccguggauau

SEQ ID NO: 3956 - RNA, 19 nt, Artificial Sequence
  Synthetic
cggaagaugugaagagagu

SEQ ID NO: 3957 - RNA, 19 nt, Artificial Sequence
  Synthetic
ugguagaaaucaucacaaa

SEQ ID NO: 3958 - RNA, 19 nt, Artificial Sequence
  Synthetic
ccacagaaaacguagcaaa

SEQ ID NO: 3959 - RNA, 19 nt, Artificial Sequence
  Synthetic
ccagaaagcugccgcacga

SEQ ID NO: 3960 - RNA, 19 nt, Artificial Sequence
  Synthetic
ugccagacaucaagagaca

SEQ ID NO: 3961 - RNA, 19 nt, Artificial Sequence
  Synthetic
aaguaaccacauuggauaa

SEQ ID NO: 3962 - RNA, 19 nt, Artificial Sequence
  Synthetic
ccggcuaacagaugaagaa

SEQ ID NO: 3963 - RNA, 19 nt, Artificial Sequence
  Synthetic
ggacaggaaaaguuugaaa

SEQ ID NO: 3964 - RNA, 19 nt, Artificial Sequence
  Synthetic
uaguagugguggugccuau

SEQ ID NO: 3965 - RNA, 19 nt, Artificial Sequence
  Synthetic
gcuaacagaugaagaaguc

SEQ ID NO: 3966 - RNA, 19 nt, Artificial Sequence
  Synthetic
aguuugagcuggaggaccu

SEQ ID NO: 3967 - RNA, 19 nt, Artificial Sequence
  Synthetic
ggacacggugguugccuua

SEQ ID NO: 3968 - RNA, 19 nt, Artificial Sequence
  Synthetic
ugacagcaaagaugaaauu

SEQ ID NO: 3969 - RNA, 19 nt, Artificial Sequence
  Synthetic
uagaaagagacauguccaa

SEQ ID NO: 3970 - RNA, 19 nt, Artificial Sequence
  Synthetic
ucaaaucagucuuggaaua

SEQ ID NO: 3971 - RNA, 19 nt, Artificial Sequence
  Synthetic
cugccuaauuugaaugaua

SEQ ID NO: 3972 - RNA, 19 nt, Artificial Sequence
  Synthetic
agacaugacuaggaagaaa

SEQ ID NO: 3973 - RNA, 19 nt, Artificial Sequence
  Synthetic
agaagaaccuaaagugaca

SEQ ID NO: 3974 - RNA, 19 nt, Artificial Sequence
  Synthetic
gcaucaaagcacuguuuaa

SEQ ID NO: 3975 - RNA, 19 nt, Artificial Sequence
  Synthetic
gguacaacccguagaacuu

SEQ ID NO: 3976 - RNA, 19 nt, Artificial Sequence
  Synthetic
caucagaggugcuucgaau

SEQ ID NO: 3977 - RNA, 19 nt, Artificial Sequence
  Synthetic
ccagaaaacauaugcauua

SEQ ID NO: 3978 - RNA, 19 nt, Artificial Sequence
  Synthetic
gacauaaacuucugccuaa

SEQ ID NO: 3979 - RNA, 19 nt, Artificial Sequence
  Synthetic
gggagauguauuuggguuu

SEQ ID NO: 3980 - RNA, 19 nt, Artificial Sequence
  Synthetic
ggaccugaaugaagaagau

SEQ ID NO: 3981 - RNA, 19 nt, Artificial Sequence
  Synthetic
ggcagugacuuuagaaaca

SEQ ID NO: 3982 - RNA, 19 nt, Artificial Sequence
  Synthetic
uuucauuagcucuggauua

SEQ ID NO: 3983 - RNA, 19 nt, Artificial Sequence
  Synthetic
ggucguauguugucuacua

SEQ ID NO: 3984 - RNA, 19 nt, Artificial Sequence
  Synthetic
cugaagacuuggagauacu

SEQ ID NO: 3985 - RNA, 19 nt, Artificial Sequence
  Synthetic
uuaauacccucguggauaa

SEQ ID NO: 3986 - RNA, 19 nt, Artificial Sequence
  Synthetic
caguggaguuguuuaaauu

SEQ ID NO: 3987 - RNA, 19 nt, Artificial Sequence
  Synthetic
gauuaaaguauccuggaau

SEQ ID NO: 3988 - RNA, 19 nt, Artificial Sequence
  Synthetic
gcucugaagacuuggagau

SEQ ID NO: 3989 - RNA, 19 nt, Artificial Sequence
  Synthetic
caaugaaugcugacccuaa

SEQ ID NO: 3990 - RNA, 19 nt, Artificial Sequence
  Synthetic
ccucaugggauuagcacau

SEQ ID NO: 3991 - RNA, 19 nt, Artificial Sequence
  Synthetic
gcugauuggcacaguguuu

SEQ ID NO: 3992 - RNA, 19 nt, Artificial Sequence
  Synthetic
ggggaucacuggaaguaaa

SEQ ID NO: 3993 - RNA, 19 nt, Artificial Sequence
  Synthetic
ggagauguauuuggguuua

SEQ ID NO: 3994 - RNA, 19 nt, Artificial Sequence
  Synthetic
ugacacagguuuaugcaga

SEQ ID NO: 3995 - RNA, 19 nt, Artificial Sequence
  Synthetic
ugacaugggcgacaguaaa

SEQ ID NO: 3996 - RNA, 19 nt, Artificial Sequence
  Synthetic
cuacuauaguccaagugaa

SEQ ID NO: 3997 - RNA, 19 nt, Artificial Sequence
  Synthetic
gagugguggcagaaggauu

SEQ ID NO: 3998 - RNA, 19 nt, Artificial Sequence
  Synthetic
acagaagaaccuaaaguga

SEQ ID NO: 3999 - RNA, 19 nt, Artificial Sequence
  Synthetic
agacauaaacuucugccua

SEQ ID NO: 4000 - RNA, 19 nt, Artificial Sequence
  Synthetic
agauaagccuggaggaaua

SEQ ID NO: 4001 - RNA, 19 nt, Artificial Sequence
  Synthetic
gggcaaauguuguuuacua

SEQ ID NO: 4002 - RNA, 19 nt, Artificial Sequence
  Synthetic
gugaauacauuuugcacaa

SEQ ID NO: 4003 - RNA, 19 nt, Artificial Sequence
  Synthetic
uggauacacugguggauaa

SEQ ID NO: 4004 - RNA, 19 nt, Artificial Sequence
  Synthetic
acucagaaaucgacuuaaa

SEQ ID NO: 4005 - RNA, 19 nt, Artificial Sequence
  Synthetic
aagaaucagucguggguuu

SEQ ID NO: 4006 - RNA, 19 nt, Artificial Sequence
  Synthetic
cauauuggcucaugaaauu

SEQ ID NO: 4007 - RNA, 19 nt, Artificial Sequence
  Synthetic
ccaccugauuaaaggaauu

SEQ ID NO: 4008 - RNA, 19 nt, Artificial Sequence
  Synthetic
aguuaaagugguagcagaa

SEQ ID NO: 4009 - RNA, 19 nt, Artificial Sequence
  Synthetic
gcacgggaauuaagaauca

SEQ ID NO: 4010 - RNA, 19 nt, Artificial Sequence
  Synthetic
ucaagaauacaguggaaau

SEQ ID NO: 4011 - RNA, 19 nt, Artificial Sequence
  Synthetic
cucugaagauauugacaua

SEQ ID NO: 4012 - RNA, 19 nt, Artificial Sequence
  Synthetic
aguagaaucuguagaccuu

SEQ ID NO: 4013 - RNA, 19 nt, Artificial Sequence
  Synthetic
ccucaguguaugaugggaa

SEQ ID NO: 4014 - RNA, 19 nt, Artificial Sequence
  Synthetic
gauuaaaggaauugaagcu

SEQ ID NO: 4015 - RNA, 19 nt, Artificial Sequence
  Synthetic
cgucagagguucuccgcau

SEQ ID NO: 4016 - RNA, 19 nt, Artificial Sequence
  Synthetic
cagcaaaugggaucaauau

SEQ ID NO: 4017 - RNA, 19 nt, Artificial Sequence
  Synthetic
gaggaauacuaaugaugga

SEQ ID NO: 4018 - RNA, 19 nt, Artificial Sequence
  Synthetic
acauauuggcucaugaaau

SEQ ID NO: 4019 - RNA, 19 nt, Artificial Sequence
  Synthetic
gggcacgggaauuaagaau

SEQ ID NO: 4020 - RNA, 19 nt, Artificial Sequence
  Synthetic
aaguuaaagugguagcaga

SEQ ID NO: 4021 - RNA, 19 nt, Artificial Sequence
  Synthetic
ccacauggcaucagcacuu

SEQ ID NO: 4022 - RNA, 19 nt, Artificial Sequence
  Synthetic
cuuaaagccuccagagaag

SEQ ID NO: 4023 - RNA, 19 nt, Artificial Sequence
  Synthetic
caguccaaaugaaguuaaa

SEQ ID NO: 4024 - RNA, 19 nt, Artificial Sequence
  Synthetic
gaauuuaaccagcaacauu

SEQ ID NO: 4025 - RNA, 19 nt, Artificial Sequence
  Synthetic
acuuaaagccuccagagaa

SEQ ID NO: 4026 - RNA, 19 nt, Artificial Sequence
  Synthetic
agugguagcagaaggauuu

SEQ ID NO: 4027 - RNA, 19 nt, Artificial Sequence
  Synthetic
gcaagggacagaaaagaaa

SEQ ID NO: 4028 - RNA, 19 nt, Artificial Sequence
  Synthetic
uggcauguguaguuaauuu

SEQ ID NO: 4029 - RNA, 19 nt, Artificial Sequence
  Synthetic
cagauaagccuggaggaau

SEQ ID NO: 4030 - RNA, 19 nt, Artificial Sequence
  Synthetic
cuacauaugucgagggaau

SEQ ID NO: 4031 - RNA, 19 nt, Artificial Sequence
  Synthetic
gggaaugcagaaagaguua

SEQ ID NO: 4032 - RNA, 19 nt, Artificial Sequence
  Synthetic
cuguauauguaucggauuu

SEQ ID NO: 4033 - RNA, 19 nt, Artificial Sequence
  Synthetic
aggaauaacuacauagcca

SEQ ID NO: 4034 - RNA, 19 nt, Artificial Sequence
  Synthetic
gggcagagaccauguuuga

SEQ ID NO: 4035 - RNA, 19 nt, Artificial Sequence
  Synthetic
guacaagccuuuaaagacu

SEQ ID NO: 4036 - RNA, 19 nt, Artificial Sequence
  Synthetic
aagccaggaugaagggaga

SEQ ID NO: 4037 - RNA, 19 nt, Artificial Sequence
  Synthetic
cagaaagaguuaaggaagg

SEQ ID NO: 4038 - RNA, 19 nt, Artificial Sequence
  Synthetic
cauacaacucugcaugaaa

SEQ ID NO: 4039 - RNA, 19 nt, Artificial Sequence
  Synthetic
gcagaaagaguuaaggaag

SEQ ID NO: 4040 - RNA, 19 nt, Artificial Sequence
  Synthetic
ucgagggaaugcagaaaga

SEQ ID NO: 4041 - RNA, 19 nt, Artificial Sequence
  Synthetic
gcguguugcuggcuggauu

SEQ ID NO: 4042 - RNA, 19 nt, Artificial Sequence
  Synthetic
ucaaguacccuuacaaaga

SEQ ID NO: 4043 - RNA, 19 nt, Artificial Sequence
  Synthetic
caucaaguacccuuacaaa

SEQ ID NO: 4044 - RNA, 19 nt, Artificial Sequence
  Synthetic
gcagagaccauguuugaca

SEQ ID NO: 4045 - RNA, 19 nt, Artificial Sequence
  Synthetic
guguacaagccuuuaaaga

SEQ ID NO: 4046 - RNA, 19 nt, Artificial Sequence
  Synthetic
ggaaucacuauccgagcaa

SEQ ID NO: 4047 - RNA, 19 nt, Artificial Sequence
  Synthetic
aggugaagcuggccuguuu

SEQ ID NO: 4048 - RNA, 19 nt, Artificial Sequence
  Synthetic
augaagggagacugggcaa

SEQ ID NO: 4049 - RNA, 19 nt, Artificial Sequence
  Synthetic
gaggaggacucucauacaa

SEQ ID NO: 4050 - RNA, 19 nt, Artificial Sequence
  Synthetic
cuuuguguguacauaguua

SEQ ID NO: 4051 - RNA, 19 nt, Artificial Sequence
  Synthetic
aagaagacaccauaccuua

SEQ ID NO: 4052 - RNA, 19 nt, Artificial Sequence
  Synthetic
ccauucaguauuaucguua

SEQ ID NO: 4053 - RNA, 19 nt, Artificial Sequence
  Synthetic
ugacugacauugccaagua

SEQ ID NO: 4054 - RNA, 19 nt, Artificial Sequence
  Synthetic
uuacaaagaagacaccaua

SEQ ID NO: 4055 - RNA, 19 nt, Artificial Sequence
  Synthetic
gagggaaugcagaaagagu

SEQ ID NO: 4056 - RNA, 19 nt, Artificial Sequence
  Synthetic
gcaugaaacaccaacaacu

SEQ ID NO: 4057 - RNA, 19 nt, Artificial Sequence
  Synthetic
ugcagaaagaguuaaggaa

SEQ ID NO: 4058 - RNA, 19 nt, Artificial Sequence
  Synthetic
caucuuucuuccuggugua

SEQ ID NO: 4059 - RNA, 19 nt, Artificial Sequence
  Synthetic
gcgaugguuacauugaaua

SEQ ID NO: 4060 - RNA, 19 nt, Artificial Sequence
  Synthetic
gggcagaacauauggguua

SEQ ID NO: 4061 - RNA, 19 nt, Artificial Sequence
  Synthetic
gcacaugaugccagaaaua

SEQ ID NO: 4062 - RNA, 19 nt, Artificial Sequence
  Synthetic
acaguagaauguagggaaa

SEQ ID NO: 4063 - RNA, 19 nt, Artificial Sequence
  Synthetic
cagcacaauuucagaagaa

SEQ ID NO: 4064 - RNA, 19 nt, Artificial Sequence
  Synthetic
ggaaacaacagcaaacuaa

SEQ ID NO: 4065 - RNA, 19 nt, Artificial Sequence
  Synthetic
cuacugaaccuuugaggaa

SEQ ID NO: 4066 - RNA, 19 nt, Artificial Sequence
  Synthetic
ggaaggaagaaaugcguuu

SEQ ID NO: 4067 - RNA, 19 nt, Artificial Sequence
  Synthetic
acugaaaacuggugagaca

SEQ ID NO: 4068 - RNA, 19 nt, Artificial Sequence
  Synthetic
agaaaugcguuuagaucuu

SEQ ID NO: 4069 - RNA, 19 nt, Artificial Sequence
  Synthetic
ugaaauaacugcaacuaga

SEQ ID NO: 4070 - RNA, 19 nt, Artificial Sequence
  Synthetic
gaaaggaggaaggaagaaa

SEQ ID NO: 4071 - RNA, 19 nt, Artificial Sequence
  Synthetic
cugaagaagucgcggucga

SEQ ID NO: 4072 - RNA, 19 nt, Artificial Sequence
  Synthetic
ccugcuauccggaaggaaa

SEQ ID NO: 4073 - RNA, 19 nt, Artificial Sequence
  Synthetic
cgaucgucccggagagcaa

SEQ ID NO: 4074 - RNA, 19 nt, Artificial Sequence
  Synthetic
cuacagaugcagaggugau

SEQ ID NO: 4075 - RNA, 19 nt, Artificial Sequence
  Synthetic
gcuauauccacuaugauua

SEQ ID NO: 4076 - RNA, 19 nt, Artificial Sequence
  Synthetic
ggaucuauuaccugaagaa

SEQ ID NO: 4077 - RNA, 19 nt, Artificial Sequence
  Synthetic
ggaggaggaggcaaaguua

SEQ ID NO: 4078 - RNA, 19 nt, Artificial Sequence
  Synthetic
aauaaaagcucguaacaca

SEQ ID NO: 4079 - RNA, 19 nt, Artificial Sequence
  Synthetic
gcagaggugaugacagcaa

SEQ ID NO: 4080 - RNA, 19 nt, Artificial Sequence
  Synthetic
caucaaguacccacugaaa

SEQ ID NO: 4081 - RNA, 19 nt, Artificial Sequence
  Synthetic
aaggcuacauucagaacua

SEQ ID NO: 4082 - RNA, 19 nt, Artificial Sequence
  Synthetic
ccauauggaucaaccacau

SEQ ID NO: 4083 - RNA, 19 nt, Artificial Sequence
  Synthetic
ggaacaaucaccacaacau

SEQ ID NO: 4084 - RNA, 19 nt, Artificial Sequence
  Synthetic
ggaaccagcugcggaggaa

SEQ ID NO: 4085 - RNA, 19 nt, Artificial Sequence
  Synthetic
agaaauagcacugaaucaa

SEQ ID NO: 4086 - RNA, 19 nt, Artificial Sequence
  Synthetic
auucagaacuacagaugca

SEQ ID NO: 4087 - RNA, 19 nt, Artificial Sequence
  Synthetic
cugcgaaacuauacuugua

SEQ ID NO: 4088 - RNA, 19 nt, Artificial Sequence
  Synthetic
ggacauuauugacaggaac

SEQ ID NO: 4089 - RNA, 19 nt, Artificial Sequence
  Synthetic
ggcagaacauauggguuaa

SEQ ID NO: 4090 - RNA, 19 nt, Artificial Sequence
  Synthetic
aggaggagcuggaacggaa

SEQ ID NO: 4091 - RNA, 19 nt, Artificial Sequence
  Synthetic
gauaguugcuguuuuguaa

SEQ ID NO: 4092 - RNA, 19 nt, Artificial Sequence
  Synthetic
gagaaggugugcaggggaa

SEQ ID NO: 4093 - RNA, 19 nt, Artificial Sequence
  Synthetic
ugacagaccuggccaagua

SEQ ID NO: 4094 - RNA, 19 nt, Artificial Sequence
  Synthetic
gcucggacuucaacaacua

SEQ ID NO: 4095 - RNA, 19 nt, Artificial Sequence
  Synthetic
ccgcgugucugauuacaaa

SEQ ID NO: 4096 - RNA, 19 nt, Artificial Sequence
  Synthetic
accacaaccacuauggaua

SEQ ID NO: 4097 - RNA, 19 nt, Artificial Sequence
  Synthetic
gcacgacucuguuggaagu

SEQ ID NO: 4098 - RNA, 19 nt, Artificial Sequence
  Synthetic
gggauguacugcauggugu

SEQ ID NO: 4099 - RNA, 19 nt, Artificial Sequence
  Synthetic
gggaagccuaccuggugua

SEQ ID NO: 4100 - RNA, 19 nt, Artificial Sequence
  Synthetic
ggauguacugcaugguguu

SEQ ID NO: 4101 - RNA, 19 nt, Artificial Sequence
  Synthetic
uaaggaagggaccgagaga

SEQ ID NO: 4102 - RNA, 19 nt, Artificial Sequence
  Synthetic
ccacaaccacuauggauac

SEQ ID NO: 4103 - RNA, 19 nt, Artificial Sequence
  Synthetic
gggaaacccugcugauguc

SEQ ID NO: 4104 - RNA, 19 nt, Artificial Sequence
  Synthetic
cuacguggcugcuguauac

SEQ ID NO: 4105 - RNA, 19 nt, Artificial Sequence
  Synthetic
ccaaauauccccuucuuuu

SEQ ID NO: 4106 - RNA, 19 nt, Artificial Sequence
  Synthetic
ucagauaguugcuguuuug

SEQ ID NO: 4107 - RNA, 19 nt, Artificial Sequence
  Synthetic
ccacuggagcgauguccuu

SEQ ID NO: 4108 - RNA, 19 nt, Artificial Sequence
  Synthetic
uggguagcccucagcauuu

SEQ ID NO: 4109 - RNA, 19 nt, Artificial Sequence
  Synthetic
cuggguagcccucagcauu

SEQ ID NO: 4110 - RNA, 19 nt, Artificial Sequence
  Synthetic
ggaagggaccgagagauca

SEQ ID NO: 4111 - RNA, 19 nt, Artificial Sequence
  Synthetic
caacuacguggcugcugua

SEQ ID NO: 4112 - RNA, 19 nt, Artificial Sequence
  Synthetic
caucucagacuucuucaaa

SEQ ID NO: 4113 - RNA, 19 nt, Artificial Sequence
  Synthetic
uaaaauagggcaccuguuu

SEQ ID NO: 4114 - RNA, 19 nt, Artificial Sequence
  Synthetic
gaccacaaccacuauggau

SEQ ID NO: 4115 - RNA, 19 nt, Artificial Sequence
  Synthetic
ggaccgagagaucagauag

SEQ ID NO: 4116 - RNA, 19 nt, Artificial Sequence
  Synthetic
aagcccagccugucacuga

SEQ ID NO: 4117 - RNA, 19 nt, Artificial Sequence
  Synthetic
gacccacaguccaguucuu

SEQ ID NO: 4118 - RNA, 19 nt, Artificial Sequence
  Synthetic
gaucagauaguugcuguuu

SEQ ID NO: 4119 - RNA, 19 nt, Artificial Sequence
  Synthetic
gaagggaccgagagaucag

SEQ ID NO: 4120 - RNA, 19 nt, Artificial Sequence
  Synthetic
gaucaaaccucgagggaaa

SEQ ID NO: 4121 - RNA, 19 nt, Artificial Sequence
  Synthetic
gaacaggacaugagggaua

SEQ ID NO: 4122 - RNA, 19 nt, Artificial Sequence
  Synthetic
gaacaaagauggaagcauu

SEQ ID NO: 4123 - RNA, 19 nt, Artificial Sequence
  Synthetic
cgaauaugcugaugaacaa

SEQ ID NO: 4124 - RNA, 19 nt, Artificial Sequence
  Synthetic
gggaacagguggugacuau

SEQ ID NO: 4125 - RNA, 19 nt, Artificial Sequence
  Synthetic
gggaaacccucuucaauaa

SEQ ID NO: 4126 - RNA, 19 nt, Artificial Sequence
  Synthetic
ggauuugguuucagcauua

SEQ ID NO: 4127 - RNA, 19 nt, Artificial Sequence
  Synthetic
ccacagaaaaucaggaaaa

SEQ ID NO: 4128 - RNA, 19 nt, Artificial Sequence
  Synthetic
ccagcaaagugaagaucua

SEQ ID NO: 4129 - RNA, 19 nt, Artificial Sequence
  Synthetic
gagggagacaggaggaaua

SEQ ID NO: 4130 - RNA, 19 nt, Artificial Sequence
  Synthetic
acauaauggacuugaacaa

SEQ ID NO: 4131 - RNA, 19 nt, Artificial Sequence
  Synthetic
caagauauuaagagagaga

SEQ ID NO: 4132 - RNA, 19 nt, Artificial Sequence
  Synthetic
agaaaguccugaagcaaau

SEQ ID NO: 4133 - RNA, 19 nt, Artificial Sequence
  Synthetic
cagaauauccgcauugaaa

SEQ ID NO: 4134 - RNA, 19 nt, Artificial Sequence
  Synthetic
ccaagaaaguccugaagca

SEQ ID NO: 4135 - RNA, 19 nt, Artificial Sequence
  Synthetic
guacaaucguugacaauga

SEQ ID NO: 4136 - RNA, 19 nt, Artificial Sequence
  Synthetic
ccaucaagauauuaagaga

SEQ ID NO: 4137 - RNA, 19 nt, Artificial Sequence
  Synthetic
ggaacagaguggauacuau

SEQ ID NO: 4138 - RNA, 19 nt, Artificial Sequence
  Synthetic
gggaacagauuauugauau

SEQ ID NO: 4139 - RNA, 19 nt, Artificial Sequence
  Synthetic
ggaaacaaacagagaccau

SEQ ID NO: 4140 - RNA, 19 nt, Artificial Sequence
  Synthetic
cagcaguucuucaacgaaa

SEQ ID NO: 4141 - RNA, 19 nt, Artificial Sequence
  Synthetic
gagaggaacaagaugaaau

SEQ ID NO: 4142 - RNA, 19 nt, Artificial Sequence
  Synthetic
gauaugaagacuugaugaa

SEQ ID NO: 4143 - RNA, 19 nt, Artificial Sequence
  Synthetic
aagaaaguccugaagcaaa

SEQ ID NO: 4144 - RNA, 19 nt, Artificial Sequence
  Synthetic
gggaaaggcugggagaaca

SEQ ID NO: 4145 - RNA, 19 nt, Artificial Sequence
  Synthetic
uaaggaagagcuagaauua

SEQ ID NO: 4146 - RNA, 19 nt, Artificial Sequence
  Synthetic
acaaacagaugcauaguau

SEQ ID NO: 4147 - RNA, 19 nt, Artificial Sequence
  Synthetic
gccaaagaguggauacuau

SEQ ID NO: 4148 - RNA, 19 nt, Artificial Sequence
  Synthetic
auuaagagagagagugauu

SEQ ID NO: 4149 - RNA, 19 nt, Artificial Sequence
  Synthetic
caaacuauguucugguaca

SEQ ID NO: 4150 - RNA, 19 nt, Artificial Sequence
  Synthetic
ccaaggaagugaugaauaa

SEQ ID NO: 4151 - RNA, 19 nt, Artificial Sequence
  Synthetic
gaacuuagguauaguguuu

SEQ ID NO: 4152 - RNA, 19 nt, Artificial Sequence
  Synthetic
caaucaaguuugcuggaaa

SEQ ID NO: 4153 - RNA, 19 nt, Artificial Sequence
  Synthetic
caacaaagauggccacauu

SEQ ID NO: 4154 - RNA, 19 nt, Artificial Sequence
  Synthetic
ccuggugaccggagagaaa

SEQ ID NO: 4155 - RNA, 19 nt, Artificial Sequence
  Synthetic
gaagaaaugcagugacuau

SEQ ID NO: 4156 - RNA, 19 nt, Artificial Sequence
  Synthetic
acaacaugcuggaguacaa

SEQ ID NO: 4157 - RNA, 19 nt, Artificial Sequence
  Synthetic
agaagcagauggaggagaa

SEQ ID NO: 4158 - RNA, 19 nt, Artificial Sequence
  Synthetic
guuaagaaccacugacaau

SEQ ID NO: 4159 - RNA, 19 nt, Artificial Sequence
  Synthetic
augcaaaccugaaggcuau

SEQ ID NO: 4160 - RNA, 19 nt, Artificial Sequence
  Synthetic
cagacaacaugcuggagua

SEQ ID NO: 4161 - RNA, 19 nt, Artificial Sequence
  Synthetic
gaggaaaccaugaggacca

SEQ ID NO: 4162 - RNA, 19 nt, Artificial Sequence
  Synthetic
ccaagaaacaucugguaca

SEQ ID NO: 4163 - RNA, 19 nt, Artificial Sequence
  Synthetic
gagaggagcaagauaguuu

SEQ ID NO: 4164 - RNA, 19 nt, Artificial Sequence
  Synthetic
gggagaagcuguuugcuca

SEQ ID NO: 4165 - RNA, 19 nt, Artificial Sequence
  Synthetic
uggaaacauuguaucgaaa

SEQ ID NO: 4166 - RNA, 19 nt, Artificial Sequence
  Synthetic
gauccaaccuagagaccau

SEQ ID NO: 4167 - RNA, 19 nt, Artificial Sequence
  Synthetic
ccguggaacuggagcuaga

SEQ ID NO: 4168 - RNA, 19 nt, Artificial Sequence
  Synthetic
gaggagaagagaagagcca

SEQ ID NO: 4169 - RNA, 19 nt, Artificial Sequence
  Synthetic
caguagagauccugaugau

SEQ ID NO: 4170 - RNA, 19 nt, Artificial Sequence
  Synthetic
uaagaaggaugucaggaua

SEQ ID NO: 4171 - RNA, 19 nt, Artificial Sequence
  Synthetic
aauacaagguacacgggaa

SEQ ID NO: 4172 - RNA, 19 nt, Artificial Sequence
  Synthetic
gagcauugcgcuuaaacua

SEQ ID NO: 4173 - RNA, 19 nt, Artificial Sequence
  Synthetic
aagaagacauggcagacua

SEQ ID NO: 4174 - RNA, 19 nt, Artificial Sequence
  Synthetic
ggaggcagguuguagauau

SEQ ID NO: 4175 - RNA, 19 nt, Artificial Sequence
  Synthetic
caacacuauucgaggagga

SEQ ID NO: 4176 - RNA, 19 nt, Artificial Sequence
  Synthetic
gcuacaaaugcuaaagaca

SEQ ID NO: 4177 - RNA, 19 nt, Artificial Sequence
  Synthetic
guaagaaggaugucaggau

SEQ ID NO: 4178 - RNA, 19 nt, Artificial Sequence
  Synthetic
uguaugaaaccaagaaaca

SEQ ID NO: 4179 - RNA, 19 nt, Artificial Sequence
  Synthetic
accaugaggcaaaggauua

SEQ ID NO: 4180 - RNA, 19 nt, Artificial Sequence
  Synthetic
ugggaaggacaaagaguuu

SEQ ID NO: 4181 - RNA, 19 nt, Artificial Sequence
  Synthetic
ggccaagccuauuguguga

SEQ ID NO: 4182 - RNA, 19 nt, Artificial Sequence
  Synthetic
acacggguauccagagcaa

SEQ ID NO: 4183 - RNA, 19 nt, Artificial Sequence
  Synthetic
ggaaaggguccaucuucaa

SEQ ID NO: 4184 - RNA, 19 nt, Artificial Sequence
  Synthetic
gcagcaagcacuacagagu

SEQ ID NO: 4185 - RNA, 19 nt, Artificial Sequence
  Synthetic
gugaaaaucuagggacauu

SEQ ID NO: 4186 - RNA, 19 nt, Artificial Sequence
  Synthetic
ccacugggaaggacaaaga

SEQ ID NO: 4187 - RNA, 19 nt, Artificial Sequence
  Synthetic
ggauuucgaaggagauuca

SEQ ID NO: 4188 - RNA, 19 nt, Artificial Sequence
  Synthetic
gaugaacacaugagaguua

SEQ ID NO: 4189 - RNA, 19 nt, Artificial Sequence
  Synthetic
aggcagaguuggacaagua

SEQ ID NO: 4190 - RNA, 19 nt, Artificial Sequence
  Synthetic
ccuagaggaucaagacaua

SEQ ID NO: 4191 - RNA, 19 nt, Artificial Sequence
  Synthetic
acaaauguguccauggaaa

SEQ ID NO: 4192 - RNA, 19 nt, Artificial Sequence
  Synthetic
gcucaaaugugcagaugau

SEQ ID NO: 4193 - RNA, 19 nt, Artificial Sequence
  Synthetic
cgccagaagcagugaagaa

SEQ ID NO: 4194 - RNA, 19 nt, Artificial Sequence
  Synthetic
gaaacauggugcagauaga

SEQ ID NO: 4195 - RNA, 19 nt, Artificial Sequence
  Synthetic
gaagaaacauggugcagau

SEQ ID NO: 4196 - RNA, 19 nt, Artificial Sequence
  Synthetic
gaguuaugucagagaagaa

SEQ ID NO: 4197 - RNA, 19 nt, Artificial Sequence
  Synthetic
ucagagaacuucagcagua

SEQ ID NO: 4198 - RNA, 19 nt, Artificial Sequence
  Synthetic
caacagaugauauguggua

SEQ ID NO: 4199 - RNA, 19 nt, Artificial Sequence
  Synthetic
acaagaaauguuuggcuua

SEQ ID NO: 4200 - RNA, 19 nt, Artificial Sequence
  Synthetic
ggacuugaaucguggucau

SEQ ID NO: 4201 - RNA, 19 nt, Artificial Sequence
  Synthetic
gcaagcaagaggaauguua

SEQ ID NO: 4202 - RNA, 19 nt, Artificial Sequence
  Synthetic
ucaaaugugcagaugauua

SEQ ID NO: 4203 - RNA, 19 nt, Artificial Sequence
  Synthetic
cagugaagaaggaggcaga

SEQ ID NO: 4204 - RNA, 19 nt, Artificial Sequence
  Synthetic
ccaauaaccaggauuuuaa

SEQ ID NO: 4205 - RNA, 19 nt, Artificial Sequence
  Synthetic
ggaaugcagaguagaagaa

SEQ ID NO: 4206 - RNA, 19 nt, Artificial Sequence
  Synthetic
ugagaaaguuugcaaugaa

SEQ ID NO: 4207 - RNA, 19 nt, Artificial Sequence
  Synthetic
ccaaaugcacccaaaguau

SEQ ID NO: 4208 - RNA, 19 nt, Artificial Sequence
  Synthetic
cugaugaccuugagaaagu

SEQ ID NO: 4209 - RNA, 19 nt, Artificial Sequence
  Synthetic
ucugggauguuaugggaaa

SEQ ID NO: 4210 - RNA, 19 nt, Artificial Sequence
  Synthetic
cgagacaacaugaguguga

SEQ ID NO: 4211 - RNA, 19 nt, Artificial Sequence
  Synthetic
ccaugaguauugcagguaa

SEQ ID NO: 4212 - RNA, 19 nt, Artificial Sequence
  Synthetic
gguaauggguugcgauaug

SEQ ID NO: 4213 - RNA, 19 nt, Artificial Sequence
  Synthetic
aguccaugauauugaaaga

SEQ ID NO: 4214 - RNA, 19 nt, Artificial Sequence
  Synthetic
gaacagguuuucuggagau

SEQ ID NO: 4215 - RNA, 19 nt, Artificial Sequence
  Synthetic
aaaucagacuccagcaauu

SEQ ID NO: 4216 - RNA, 19 nt, Artificial Sequence
  Synthetic
cacugaugaccuugagaaa

SEQ ID NO: 4217 - RNA, 19 nt, Artificial Sequence
  Synthetic
cagaagcagugaagaagga

SEQ ID NO: 4218 - RNA, 19 nt, Artificial Sequence
  Synthetic
ggaagaugcuccagagaga

SEQ ID NO: 4219 - RNA, 19 nt, Artificial Sequence
  Synthetic
ggagaagucuggcgaggaa

SEQ ID NO: 4220 - RNA, 19 nt, Artificial Sequence
  Synthetic
gagcagaagaggaugaauu

SEQ ID NO: 4221 - RNA, 19 nt, Artificial Sequence
  Synthetic
uugaagagauuauggagaa

SEQ ID NO: 4222 - RNA, 19 nt, Artificial Sequence
  Synthetic
cuccagagccugagguuua

SEQ ID NO: 4223 - RNA, 19 nt, Artificial Sequence
  Synthetic
agaaaguggucuugcugaa

SEQ ID NO: 4224 - RNA, 19 nt, Artificial Sequence
  Synthetic
cugaauccacauagagaaa

SEQ ID NO: 4225 - RNA, 19 nt, Artificial Sequence
  Synthetic
ccaaguguuuagaaugaaa

SEQ ID NO: 4226 - RNA, 19 nt, Artificial Sequence
  Synthetic
gcgcuaggguggagagaag

SEQ ID NO: 4227 - RNA, 19 nt, Artificial Sequence
  Synthetic
uaaaguagagggagaagaa

SEQ ID NO: 4228 - RNA, 19 nt, Artificial Sequence
  Synthetic
caggaaagccauacugaau

SEQ ID NO: 4229 - RNA, 19 nt, Artificial Sequence
  Synthetic
ccuaggaaguguaauguau

SEQ ID NO: 4230 - RNA, 19 nt, Artificial Sequence
  Synthetic
cagaagaggaugaauuuau

SEQ ID NO: 4231 - RNA, 19 nt, Artificial Sequence
  Synthetic
gaacagugaugcuggaaac

SEQ ID NO: 4232 - RNA, 19 nt, Artificial Sequence
  Synthetic
ggaaagccauacugaauca

SEQ ID NO: 4233 - RNA, 19 nt, Artificial Sequence
  Synthetic
ucugggauguuaugaguaa

SEQ ID NO: 4234 - RNA, 19 nt, Artificial Sequence
  Synthetic
caagggaagucgagauaac

SEQ ID NO: 4235 - RNA, 19 nt, Artificial Sequence
  Synthetic
cacaagggaagucgagaua

SEQ ID NO: 4236 - RNA, 19 nt, Artificial Sequence
  Synthetic
gaugauaauuuguguguug

SEQ ID NO: 4237 - RNA, 19 nt, Artificial Sequence
  Synthetic
ggacaggagugguucaacu

SEQ ID NO: 4238 - RNA, 19 nt, Artificial Sequence
  Synthetic
aggagaugcugacuaguua

SEQ ID NO: 4239 - RNA, 19 nt, Artificial Sequence
  Synthetic
cgagauaacaugaguauug

SEQ ID NO: 4240 - RNA, 19 nt, Artificial Sequence
  Synthetic
gaugauacaacguguuaau

SEQ ID NO: 4241 - RNA, 19 nt, Artificial Sequence
  Synthetic
ggacaagucugcuuuucua

SEQ ID NO: 4242 - RNA, 19 nt, Artificial Sequence
  Synthetic
aaccaaguguuuagaauga

SEQ ID NO: 4243 - RNA, 19 nt, Artificial Sequence
  Synthetic
gauuagagagauuaugcua

SEQ ID NO: 4244 - RNA, 19 nt, Artificial Sequence
  Synthetic
uggcaagcguaauguuauu

SEQ ID NO: 4245 - RNA, 19 nt, Artificial Sequence
  Synthetic
gcguaauguuauugaagcu

SEQ ID NO: 4246 - RNA, 19 nt, Artificial Sequence
  Synthetic
guugaagagauuauggaga

SEQ ID NO: 4247 - RNA, 19 nt, Artificial Sequence
  Synthetic
gccugagguuuaugaaauu

SEQ ID NO: 4248 - RNA, 19 nt, Artificial Sequence
  Synthetic
ugagauagcucgagagaau

SEQ ID NO: 4249 - RNA, 19 nt, Artificial Sequence
  Synthetic
ggguauaaguugcuguaaa

SEQ ID NO: 4250 - RNA, 19 nt, Artificial Sequence
  Synthetic
ccaaugaagaugaguuaua

SEQ ID NO: 4251 - RNA, 19 nt, Artificial Sequence
  Synthetic
cgaaauggcuuaagucgaa

SEQ ID NO: 4252 - RNA, 19 nt, Artificial Sequence
  Synthetic
gcauagacgaaauggcuua

SEQ ID NO: 4253 - RNA, 19 nt, Artificial Sequence
  Synthetic
gcgaaagaacucuguuaaa

SEQ ID NO: 4254 - RNA, 19 nt, Artificial Sequence
  Synthetic
aaugaaagcccaagaaauu

SEQ ID NO: 4255 - RNA, 19 nt, Artificial Sequence
  Synthetic
ccucagaagcacaaguaua

SEQ ID NO: 4256 - RNA, 19 nt, Artificial Sequence
  Synthetic
gguauaaguugcuguaaaa

SEQ ID NO: 4257 - RNA, 19 nt, Artificial Sequence
  Synthetic
uguccaagguguagucaua

SEQ ID NO: 4258 - RNA, 19 nt, Artificial Sequence
  Synthetic
agauaacacuagugccaua

SEQ ID NO: 4259 - RNA, 19 nt, Artificial Sequence
  Synthetic
gaagaagcauagacgaaau

SEQ ID NO: 4260 - RNA, 19 nt, Artificial Sequence
  Synthetic
ggacuuggugggaguguaa

SEQ ID NO: 4261 - RNA, 19 nt, Artificial Sequence
  Synthetic
guuagaaggagcacaguua

SEQ ID NO: 4262 - RNA, 19 nt, Artificial Sequence
  Synthetic
ucaagaagcagaaggguuu

SEQ ID NO: 4263 - RNA, 19 nt, Artificial Sequence
  Synthetic
cggaauggccaaagacuau

SEQ ID NO: 4264 - RNA, 19 nt, Artificial Sequence
  Synthetic
ggaaagagaacgaaucgaa

SEQ ID NO: 4265 - RNA, 19 nt, Artificial Sequence
  Synthetic
ggaagaaacuggcggaaug

SEQ ID NO: 4266 - RNA, 19 nt, Artificial Sequence
  Synthetic
agugauggacuuuggaaua

SEQ ID NO: 4267 - RNA, 19 nt, Artificial Sequence
  Synthetic
cauagaaggaaguguguuu

SEQ ID NO: 4268 - RNA, 19 nt, Artificial Sequence
  Synthetic
augaagaagcauagacgaa

SEQ ID NO: 4269 - RNA, 19 nt, Artificial Sequence
  Synthetic
ccacaaccucacagcgaaa

SEQ ID NO: 4270 - RNA, 19 nt, Artificial Sequence
  Synthetic
ggaaguacauggaggacgu

SEQ ID NO: 4271 - RNA, 19 nt, Artificial Sequence
  Synthetic
cgaaggacuuggugggagu

SEQ ID NO: 4272 - RNA, 19 nt, Artificial Sequence
  Synthetic
gcagauaacacuagugcca

SEQ ID NO: 4273 - RNA, 19 nt, Artificial Sequence
  Synthetic
gcggaauggccaaagacua

SEQ ID NO: 4274 - RNA, 19 nt, Artificial Sequence
  Synthetic
gaauaauagccuuccaauu

SEQ ID NO: 4275 - RNA, 19 nt, Artificial Sequence
  Synthetic
aaaccuuagucaucagaua

SEQ ID NO: 4276 - RNA, 19 nt, Artificial Sequence
  Synthetic
ccuacuaauucaacaaaca

SEQ ID NO: 4277 - RNA, 19 nt, Artificial Sequence
  Synthetic
aaaugaaagcccaagaaau

SEQ ID NO: 4278 - RNA, 19 nt, Artificial Sequence
  Synthetic
gggaagagaaauaggauaa

SEQ ID NO: 4279 - RNA, 19 nt, Artificial Sequence
  Synthetic
ggaagugggaagagaaaua

SEQ ID NO: 4280 - RNA, 19 nt, Artificial Sequence
  Synthetic
gggccaagcuguugaacua

SEQ ID NO: 4281 - RNA, 19 nt, Artificial Sequence
  Synthetic
gauaaggcuuugugggaaa

SEQ ID NO: 4282 - RNA, 19 nt, Artificial Sequence
  Synthetic
uggaaaggguacagugaaa

SEQ ID NO: 4283 - RNA, 19 nt, Artificial Sequence
  Synthetic
agguuaugcuugugagaaa

SEQ ID NO: 4284 - RNA, 19 nt, Artificial Sequence
  Synthetic
uaaagaggguaaagggaaa

SEQ ID NO: 4285 - RNA, 19 nt, Artificial Sequence
  Synthetic
uguaaauguuagugaggaa

SEQ ID NO: 4286 - RNA, 19 nt, Artificial Sequence
  Synthetic
cagaaagacucaugauauu

SEQ ID NO: 4287 - RNA, 19 nt, Artificial Sequence
  Synthetic
cauuauaucccaaaggaaa

SEQ ID NO: 4288 - RNA, 19 nt, Artificial Sequence
  Synthetic
acaaauagaagcaagcaaa

SEQ ID NO: 4289 - RNA, 19 nt, Artificial Sequence
  Synthetic
ucagaaagauuuacggauu

SEQ ID NO: 4290 - RNA, 19 nt, Artificial Sequence
  Synthetic
caaugaaagugguaaauca

SEQ ID NO: 4291 - RNA, 19 nt, Artificial Sequence
  Synthetic
gaguggugcuggagaguuu

SEQ ID NO: 4292 - RNA, 19 nt, Artificial Sequence
  Synthetic
gcaggaaaauggaggacaa

SEQ ID NO: 4293 - RNA, 19 nt, Artificial Sequence
  Synthetic
cagaaagauuuacggauuu

SEQ ID NO: 4294 - RNA, 19 nt, Artificial Sequence
  Synthetic
gcaaauagcuuaaaugucu

SEQ ID NO: 4295 - RNA, 19 nt, Artificial Sequence
  Synthetic
ggagauugagacagugaaa

SEQ ID NO: 4296 - RNA, 19 nt, Artificial Sequence
  Synthetic
aaacaaaggcagcagacua

SEQ ID NO: 4297 - RNA, 19 nt, Artificial Sequence
  Synthetic
uggcacagauucagguuua

SEQ ID NO: 4298 - RNA, 19 nt, Artificial Sequence
  Synthetic
caacugaagucauuacaaa

SEQ ID NO: 4299 - RNA, 19 nt, Artificial Sequence
  Synthetic
agauugagacagugaaauu

SEQ ID NO: 4300 - RNA, 19 nt, Artificial Sequence
  Synthetic
gggaguagaugcugcuauu

SEQ ID NO: 4301 - RNA, 19 nt, Artificial Sequence
  Synthetic
caaauacacuauagaguca

SEQ ID NO: 4302 - RNA, 19 nt, Artificial Sequence
  Synthetic
gcaagaagaugguggggau

SEQ ID NO: 4303 - RNA, 19 nt, Artificial Sequence
  Synthetic
gaugcugggucaagugaua

SEQ ID NO: 4304 - RNA, 19 nt, Artificial Sequence
  Synthetic
gcaacaaugucaaugucaa

SEQ ID NO: 4305 - RNA, 19 nt, Artificial Sequence
  Synthetic
ugaaggaggcugaaaguau

SEQ ID NO: 4306 - RNA, 19 nt, Artificial Sequence
  Synthetic
ggacaugaacaaagcugua

SEQ ID NO: 4307 - RNA, 19 nt, Artificial Sequence
  Synthetic
ggugaaaguucuacacuca

SEQ ID NO: 4308 - RNA, 19 nt, Artificial Sequence
  Synthetic
gagaaugguuggccacaaa

SEQ ID NO: 4309 - RNA, 19 nt, Artificial Sequence
  Synthetic
cagaugagguugagaccau

SEQ ID NO: 4310 - RNA, 19 nt, Artificial Sequence
  Synthetic
aagaagaggaggaggacga

SEQ ID NO: 4311 - RNA, 19 nt, Artificial Sequence
  Synthetic
aggaagaagaagaggagga

SEQ ID NO: 4312 - RNA, 19 nt, Artificial Sequence
  Synthetic
ccacagaagagcagcccaa

SEQ ID NO: 4313 - RNA, 19 nt, Artificial Sequence
  Synthetic
gagccaaacucuugaagca

SEQ ID NO: 4314 - RNA, 19 nt, Artificial Sequence
  Synthetic
augcagaagugucaauaaa

SEQ ID NO: 4315 - RNA, 19 nt, Artificial Sequence
  Synthetic
aagaagaagaggaggagga

SEQ ID NO: 4316 - RNA, 19 nt, Artificial Sequence
  Synthetic
ugacgaagagagagaauga

SEQ ID NO: 4317 - RNA, 19 nt, Artificial Sequence
  Synthetic
agacagaccuuuccgaauu

SEQ ID NO: 4318 - RNA, 19 nt, Artificial Sequence
  Synthetic
ggcauaaccuugacgaaga

SEQ ID NO: 4319 - RNA, 19 nt, Artificial Sequence
  Synthetic
ggguucauauuuacagaua

SEQ ID NO: 4320 - RNA, 19 nt, Artificial Sequence
  Synthetic
ggauaggcccauugagguu

SEQ ID NO: 4321 - RNA, 19 nt, Artificial Sequence
  Synthetic
guuaaaggaagcaguguuu

SEQ ID NO: 4322 - RNA, 19 nt, Artificial Sequence
  Synthetic
uaagugggcuggagaagaa

SEQ ID NO: 4323 - RNA, 19 nt, Artificial Sequence
  Synthetic
ccaagaagcuaggugguuu

SEQ ID NO: 4324 - RNA, 19 nt, Artificial Sequence
  Synthetic
ccaguugggcuguguuaaa

SEQ ID NO: 4325 - RNA, 19 nt, Artificial Sequence
  Synthetic
ggaccuugcugcuguguga

SEQ ID NO: 4326 - RNA, 19 nt, Artificial Sequence
  Synthetic
acgaugacgaggaggaaaa

SEQ ID NO: 4327 - RNA, 19 nt, Artificial Sequence
  Synthetic
gcguggaugcugcgaggua

SEQ ID NO: 4328 - RNA, 19 nt, Artificial Sequence
  Synthetic
aaacauagucgcugucauu

SEQ ID NO: 4329 - RNA, 19 nt, Artificial Sequence
  Synthetic
gaccagaacggcaggauga

SEQ ID NO: 4330 - RNA, 19 nt, Artificial Sequence
  Synthetic
gggaggaagaagaagagga

SEQ ID NO: 4331 - RNA, 19 nt, Artificial Sequence
  Synthetic
ccagggaggaagaagaaga

SEQ ID NO: 4332 - RNA, 19 nt, Artificial Sequence
  Synthetic
ccagguggguucauauuua

SEQ ID NO: 4333 - RNA, 19 nt, Artificial Sequence
  Synthetic
ucccaaauaucuugugaau

SEQ ID NO: 4334 - RNA, 19 nt, Artificial Sequence
  Synthetic
ucaggaaagccaagcgaga

SEQ ID NO: 4335 - RNA, 19 nt, Artificial Sequence
  Synthetic
ccacaaacaaugaccaagu

SEQ ID NO: 4336 - RNA, 19 nt, Artificial Sequence
  Synthetic
uuacacagcuuugaagaaa

SEQ ID NO: 4337 - RNA, 19 nt, Artificial Sequence
  Synthetic
caaacaaugaccaaguauu

SEQ ID NO: 4338 - RNA, 19 nt, Artificial Sequence
  Synthetic
cgaugaagaagaagaagaa

SEQ ID NO: 4339 - RNA, 19 nt, Artificial Sequence
  Synthetic
aggcagagaaugaggaaga

SEQ ID NO: 4340 - RNA, 19 nt, Artificial Sequence
  Synthetic
cagaugaggcggaggaaga

SEQ ID NO: 4341 - RNA, 19 nt, Artificial Sequence
  Synthetic
uggaagagcugcuggauca

SEQ ID NO: 4342 - RNA, 19 nt, Artificial Sequence
  Synthetic
cggaggaagaagaggaaga

SEQ ID NO: 4343 - RNA, 19 nt, Artificial Sequence
  Synthetic
cagcagagcuccagccaga

SEQ ID NO: 4344 - RNA, 19 nt, Artificial Sequence
  Synthetic
cugaagaagucauuaaaga

SEQ ID NO: 4345 - RNA, 19 nt, Artificial Sequence
  Synthetic
gugaggaggcagagaauga

SEQ ID NO: 4346 - RNA, 19 nt, Artificial Sequence
  Synthetic
ggacgaugaagaagaagaa

SEQ ID NO: 4347 - RNA, 19 nt, Artificial Sequence
  Synthetic
agaagaaggccaagcgaga

SEQ ID NO: 4348 - RNA, 19 nt, Artificial Sequence
  Synthetic
cugaagaggacgaugaaga

SEQ ID NO: 4349 - RNA, 19 nt, Artificial Sequence
  Synthetic
acagaaggcuuuagaagau

SEQ ID NO: 4350 - RNA, 19 nt, Artificial Sequence
  Synthetic
gcgaggaagaggauggcua

SEQ ID NO: 4351 - RNA, 19 nt, Artificial Sequence
  Synthetic
agaggaagacagugaggaa

SEQ ID NO: 4352 - RNA, 19 nt, Artificial Sequence
  Synthetic
augaagaugauguggacaa

SEQ ID NO: 4353 - RNA, 19 nt, Artificial Sequence
  Synthetic
ccacugaagaagucauuaa

SEQ ID NO: 4354 - RNA, 19 nt, Artificial Sequence
  Synthetic
uggcaaagcuuuagacaug

SEQ ID NO: 4355 - RNA, 19 nt, Artificial Sequence
  Synthetic
acaagaagaagaaggccaa

SEQ ID NO: 4356 - RNA, 19 nt, Artificial Sequence
  Synthetic
aagaagaggaagacaguga

SEQ ID NO: 4357 - RNA, 19 nt, Artificial Sequence
  Synthetic
gcaacagcgacaagaagaa

SEQ ID NO: 4358 - RNA, 19 nt, Artificial Sequence
  Synthetic
aagaagaagaagagaugau

SEQ ID NO: 4359 - RNA, 19 nt, Artificial Sequence
  Synthetic
augaagaagaagaagaaga

SEQ ID NO: 4360 - RNA, 19 nt, Artificial Sequence
  Synthetic
caaauugaccacugaagaa

SEQ ID NO: 4361 - RNA, 19 nt, Artificial Sequence
  Synthetic
ggacagugaggaugaguca

SEQ ID NO: 4362 - RNA, 19 nt, Artificial Sequence
  Synthetic
ccacugaggaugaagauga

SEQ ID NO: 4363 - RNA, 19 nt, Artificial Sequence
  Synthetic
ggaaacuccuucacaagaa

SEQ ID NO: 4364 - RNA, 19 nt, Artificial Sequence
  Synthetic
ucaaagaucagaaggccua

SEQ ID NO: 4365 - RNA, 19 nt, Artificial Sequence
  Synthetic
aagaagaagaagaagagau

SEQ ID NO: 4366 - RNA, 19 nt, Artificial Sequence
  Synthetic
cagagaguggcaagcgaaa

SEQ ID NO: 4367 - RNA, 19 nt, Artificial Sequence
  Synthetic
augaggaagaugaggauga

SEQ ID NO: 4368 - RNA, 19 nt, Artificial Sequence
  Synthetic
aaggaaagaaagaggauaa

SEQ ID NO: 4369 - RNA, 19 nt, Artificial Sequence
  Synthetic
gaaagaaagaggauaaaga

SEQ ID NO: 4370 - RNA, 19 nt, Artificial Sequence
  Synthetic
ggccaagagcauaguuuua

SEQ ID NO: 4371 - RNA, 19 nt, Artificial Sequence
  Synthetic
aagaaagaggauaaagaga

SEQ ID NO: 4372 - RNA, 19 nt, Artificial Sequence
  Synthetic
cagucaugguggugaaguu

SEQ ID NO: 4373 - RNA, 19 nt, Artificial Sequence
  Synthetic
caguugaaggaaagaaaga

SEQ ID NO: 4374 - RNA, 19 nt, Artificial Sequence
  Synthetic
augaagaagcaguucgauu

SEQ ID NO: 4375 - RNA, 19 nt, Artificial Sequence
  Synthetic
ccaagagugucgugaaaca

SEQ ID NO: 4376 - RNA, 19 nt, Artificial Sequence
  Synthetic
acugauggguugugggaga

SEQ ID NO: 4377 - RNA, 19 nt, Artificial Sequence
  Synthetic
gggcauuuggagauguaaa

SEQ ID NO: 4378 - RNA, 19 nt, Artificial Sequence
  Synthetic
ugguuaggauuguggguga

SEQ ID NO: 4379 - RNA, 19 nt, Artificial Sequence
  Synthetic
gcucgaauguacagagaug

SEQ ID NO: 4380 - RNA, 19 nt, Artificial Sequence
  Synthetic
aggauaaguuucugguguu

SEQ ID NO: 4381 - RNA, 19 nt, Artificial Sequence
  Synthetic
gcaaucagcugccugcaaa

SEQ ID NO: 4382 - RNA, 19 nt, Artificial Sequence
  Synthetic
acagaaaggagaaccaaaa

SEQ ID NO: 4383 - RNA, 19 nt, Artificial Sequence
  Synthetic
gcauccaaauuguacuuua

SEQ ID NO: 4384 - RNA, 19 nt, Artificial Sequence
  Synthetic
ccgccaaagccaagaaaua

SEQ ID NO: 4385 - RNA, 19 nt, Artificial Sequence
  Synthetic
caucuggucucuugaauaa

SEQ ID NO: 4386 - RNA, 19 nt, Artificial Sequence
  Synthetic
uggauugauuguacagaaa

SEQ ID NO: 4387 - RNA, 19 nt, Artificial Sequence
  Synthetic
cggccauaguggacgaaaa

SEQ ID NO: 4388 - RNA, 19 nt, Artificial Sequence
  Synthetic
gagcagauucggcggauca

SEQ ID NO: 4389 - RNA, 19 nt, Artificial Sequence
  Synthetic
guuucuacgaugagugcaa

SEQ ID NO: 4390 - RNA, 19 nt, Artificial Sequence
  Synthetic
caagaucugcggugacaua

SEQ ID NO: 4391 - RNA, 19 nt, Artificial Sequence
  Synthetic
gcuacgaguucuuugccaa

SEQ ID NO: 4392 - RNA, 19 nt, Artificial Sequence
  Synthetic
ccgacaagaacaaggggaa

SEQ ID NO: 4393 - RNA, 19 nt, Artificial Sequence
  Synthetic
gcaagagacgcuacaacau

SEQ ID NO: 4394 - RNA, 19 nt, Artificial Sequence
  Synthetic
ccaucuggucucuugaaua

SEQ ID NO: 4395 - RNA, 19 nt, Artificial Sequence
  Synthetic
gcgagaagcucaaccugga

SEQ ID NO: 4396 - RNA, 19 nt, Artificial Sequence
  Synthetic
uggccaaguuccuccacaa

SEQ ID NO: 4397 - RNA, 19 nt, Artificial Sequence
  Synthetic
ccaugaugaguguggacga

SEQ ID NO: 4398 - RNA, 19 nt, Artificial Sequence
  Synthetic
auggauugauuguacagaa

SEQ ID NO: 4399 - RNA, 19 nt, Artificial Sequence
  Synthetic
auguacagcugacagagaa

SEQ ID NO: 4400 - RNA, 19 nt, Artificial Sequence
  Synthetic
caacaucaaacuguggaaa

SEQ ID NO: 4401 - RNA, 19 nt, Artificial Sequence
  Synthetic
cccagaugauggauugauu

SEQ ID NO: 4402 - RNA, 19 nt, Artificial Sequence
  Synthetic
cugcuggccuauaagauca

SEQ ID NO: 4403 - RNA, 19 nt, Artificial Sequence
  Synthetic
ggauugauuguacagaaau

SEQ ID NO: 4404 - RNA, 19 nt, Artificial Sequence
  Synthetic
gaugauggauugauuguac

SEQ ID NO: 4405 - RNA, 19 nt, Artificial Sequence
  Synthetic
ccgaggugguggccaaguu

SEQ ID NO: 4406 - RNA, 19 nt, Artificial Sequence
  Synthetic
ccaaguuccuccacaagca

SEQ ID NO: 4407 - RNA, 19 nt, Artificial Sequence
  Synthetic
acauggagccuugguguau

SEQ ID NO: 4408 - RNA, 19 nt, Artificial Sequence
  Synthetic
aagagacgcuacaacauca

SEQ ID NO: 4409 - RNA, 19 nt, Artificial Sequence
  Synthetic
ugcaagagacgcuacaaca

SEQ ID NO: 4410 - RNA, 19 nt, Artificial Sequence
  Synthetic
ugacauacacggccaguac

SEQ ID NO: 4411 - RNA, 19 nt, Artificial Sequence
  Synthetic
cagaugauggauugauugu

SEQ ID NO: 4412 - RNA, 19 nt, Artificial Sequence
  Synthetic
caucuaugguuucuacgau

SEQ ID NO: 4413 - RNA, 19 nt, Artificial Sequence
  Synthetic
ucuaugguuucuacgauga

SEQ ID NO: 4414 - RNA, 19 nt, Artificial Sequence
  Synthetic
gggaagagcuuuacagaca

SEQ ID NO: 4415 - RNA, 19 nt, Artificial Sequence
  Synthetic
caacacgacuugaaauaaa

SEQ ID NO: 4416 - RNA, 19 nt, Artificial Sequence
  Synthetic
gcagaugacugaagcagaa

SEQ ID NO: 4417 - RNA, 19 nt, Artificial Sequence
  Synthetic
ggguaaaggaucuuaaauu

SEQ ID NO: 4418 - RNA, 19 nt, Artificial Sequence
  Synthetic
guaaauucauccaggucaa

SEQ ID NO: 4419 - RNA, 19 nt, Artificial Sequence
  Synthetic
agacuaaguauguugguua

SEQ ID NO: 4420 - RNA, 19 nt, Artificial Sequence
  Synthetic
agcagaaguucgaggcuua

SEQ ID NO: 4421 - RNA, 19 nt, Artificial Sequence
  Synthetic
caggaaagauugugcagau

SEQ ID NO: 4422 - RNA, 19 nt, Artificial Sequence
  Synthetic
gcuaaacgacaguugguaa

SEQ ID NO: 4423 - RNA, 19 nt, Artificial Sequence
  Synthetic
ggaagauggauaugaauuu

SEQ ID NO: 4424 - RNA, 19 nt, Artificial Sequence
  Synthetic
ucaaauauccagagaacuu

SEQ ID NO: 4425 - RNA, 19 nt, Artificial Sequence
  Synthetic
ugagaaaccuguuaacuua

SEQ ID NO: 4426 - RNA, 19 nt, Artificial Sequence
  Synthetic
guaaagaaaccaucagauu

SEQ ID NO: 4427 - RNA, 19 nt, Artificial Sequence
  Synthetic
gugcaaggcuggggagaaa

SEQ ID NO: 4428 - RNA, 19 nt, Artificial Sequence
  Synthetic
ucacuagaauaauggcaaa

SEQ ID NO: 4429 - RNA, 19 nt, Artificial Sequence
  Synthetic
cggagaauuaugagaccua

SEQ ID NO: 4430 - RNA, 19 nt, Artificial Sequence
  Synthetic
gguggaagauggauaugaa

SEQ ID NO: 4431 - RNA, 19 nt, Artificial Sequence
  Synthetic
ggcaacacgacuugaaaua

SEQ ID NO: 4432 - RNA, 19 nt, Artificial Sequence
  Synthetic
gcugaaaauuuguggagau

SEQ ID NO: 4433 - RNA, 19 nt, Artificial Sequence
  Synthetic
uggagauauucauggacaa

SEQ ID NO: 4434 - RNA, 19 nt, Artificial Sequence
  Synthetic
ugauaaugcugguggaaug

SEQ ID NO: 4435 - RNA, 19 nt, Artificial Sequence
  Synthetic
agauaaggcucauauagua

SEQ ID NO: 4436 - RNA, 19 nt, Artificial Sequence
  Synthetic
gaaugcaaacgaagauuua

SEQ ID NO: 4437 - RNA, 19 nt, Artificial Sequence
  Synthetic
gacuaaguauguugguuaa

SEQ ID NO: 4438 - RNA, 19 nt, Artificial Sequence
  Synthetic
ucacaaagguuuuaucuga

SEQ ID NO: 4439 - RNA, 19 nt, Artificial Sequence
  Synthetic
aaucaaauauccagagaac

SEQ ID NO: 4440 - RNA, 19 nt, Artificial Sequence
  Synthetic
gcaaugaguagaaaaguua

SEQ ID NO: 4441 - RNA, 19 nt, Artificial Sequence
  Synthetic
cugaaaauuuguggagaua

SEQ ID NO: 4442 - RNA, 19 nt, Artificial Sequence
  Synthetic
gauuauguggacagaggaa

SEQ ID NO: 4443 - RNA, 19 nt, Artificial Sequence
  Synthetic
guauguugguuaauaggaa

SEQ ID NO: 4444 - RNA, 19 nt, Artificial Sequence
  Synthetic
gcggugaaguugaggcuua

SEQ ID NO: 4445 - RNA, 19 nt, Artificial Sequence
  Synthetic
uuuaaagccugcagagaaa

SEQ ID NO: 4446 - RNA, 19 nt, Artificial Sequence
  Synthetic
caaagcaagcaaagaaaua

SEQ ID NO: 4447 - RNA, 19 nt, Artificial Sequence
  Synthetic
gcaaagaggcaguugguca

SEQ ID NO: 4448 - RNA, 19 nt, Artificial Sequence
  Synthetic
gguugaagauggauaugaa

SEQ ID NO: 4449 - RNA, 19 nt, Artificial Sequence
  Synthetic
gguuauaacagcaaaugaa

SEQ ID NO: 4450 - RNA, 19 nt, Artificial Sequence
  Synthetic
ucacaaagcaagcaaagaa

SEQ ID NO: 4451 - RNA, 19 nt, Artificial Sequence
  Synthetic
ggguaugaucacaaagcaa

SEQ ID NO: 4452 - RNA, 19 nt, Artificial Sequence
  Synthetic
aguugaggcuuauaaguua

SEQ ID NO: 4453 - RNA, 19 nt, Artificial Sequence
  Synthetic
ggaaagcagucauuggaga

SEQ ID NO: 4454 - RNA, 19 nt, Artificial Sequence
  Synthetic
gugauauagugcuguuuaa

SEQ ID NO: 4455 - RNA, 19 nt, Artificial Sequence
  Synthetic
gcuaucaacauuaggagua

SEQ ID NO: 4456 - RNA, 19 nt, Artificial Sequence
  Synthetic
cuuaaagucucgugaaauc

SEQ ID NO: 4457 - RNA, 19 nt, Artificial Sequence
  Synthetic
guccaagccugguaagaau

SEQ ID NO: 4458 - RNA, 19 nt, Artificial Sequence
  Synthetic
guaagaauguccagcuuca

SEQ ID NO: 4459 - RNA, 19 nt, Artificial Sequence
  Synthetic
ugcuuaaagucucgugaaa

SEQ ID NO: 4460 - RNA, 19 nt, Artificial Sequence
  Synthetic
cugcugucauggagguuua

SEQ ID NO: 4461 - RNA, 19 nt, Artificial Sequence
  Synthetic
ggaaggcgauggcggauuu

SEQ ID NO: 4462 - RNA, 19 nt, Artificial Sequence
  Synthetic
cuaucaacauuaggaguaa

SEQ ID NO: 4463 - RNA, 19 nt, Artificial Sequence
  Synthetic
uguacauguucuugucaua

SEQ ID NO: 4464 - RNA, 19 nt, Artificial Sequence
  Synthetic
agccaaaguuucuguugaa

SEQ ID NO: 4465 - RNA, 19 nt, Artificial Sequence
  Synthetic
ccaaaguuucuguugaauu

SEQ ID NO: 4466 - RNA, 19 nt, Artificial Sequence
  Synthetic
cuucacauuuggugcagaa

SEQ ID NO: 4467 - RNA, 19 nt, Artificial Sequence
  Synthetic
cagaugaccguguacaaua

SEQ ID NO: 4468 - RNA, 19 nt, Artificial Sequence
  Synthetic
cacaaagcaagcaaagaaa

SEQ ID NO: 4469 - RNA, 19 nt, Artificial Sequence
  Synthetic
aguacaaggugguaugguu

SEQ ID NO: 4470 - RNA, 19 nt, Artificial Sequence
  Synthetic
guugaggcuuauaaguuaa

SEQ ID NO: 4471 - RNA, 19 nt, Artificial Sequence
  Synthetic
ucacaguaccuaugacuuu

SEQ ID NO: 4472 - RNA, 19 nt, Artificial Sequence
  Synthetic
ucuuauauguagagcccau

SEQ ID NO: 4473 - RNA, 19 nt, Artificial Sequence
  Synthetic
cggcgaauuaugcgaccaa

SEQ ID NO: 4474 - RNA, 19 nt, Artificial Sequence
  Synthetic
gaacagagauccugaaauu

SEQ ID NO: 4475 - RNA, 19 nt, Artificial Sequence
  Synthetic
ggagaaacagcaaggauua

SEQ ID NO: 4476 - RNA, 19 nt, Artificial Sequence
  Synthetic
ggaggaagacggagaaaca

SEQ ID NO: 4477 - RNA, 19 nt, Artificial Sequence
  Synthetic
ggcgagagcuccacggaaa

SEQ ID NO: 4478 - RNA, 19 nt, Artificial Sequence
  Synthetic
cugcuguauuuaugagaaa

SEQ ID NO: 4479 - RNA, 19 nt, Artificial Sequence
  Synthetic
gauagagggaagaggaaga

SEQ ID NO: 4480 - RNA, 19 nt, Artificial Sequence
  Synthetic
gaaacggaagccagagaaa

SEQ ID NO: 4481 - RNA, 19 nt, Artificial Sequence
  Synthetic
ggaaagugaugaggaggaa

SEQ ID NO: 4482 - RNA, 19 nt, Artificial Sequence
  Synthetic
gggagggagcaaagagauu

SEQ ID NO: 4483 - RNA, 19 nt, Artificial Sequence
  Synthetic
cggagaaacagcaaggauu

SEQ ID NO: 4484 - RNA, 19 nt, Artificial Sequence
  Synthetic
gugaugaggaggaagaaga

SEQ ID NO: 4485 - RNA, 19 nt, Artificial Sequence
  Synthetic
cggaaagugaugaggagga

SEQ ID NO: 4486 - RNA, 19 nt, Artificial Sequence
  Synthetic
uaggagaaccggagccuua

SEQ ID NO: 4487 - RNA, 19 nt, Artificial Sequence
  Synthetic
caaccgagcccgaugauuu

SEQ ID NO: 4488 - RNA, 19 nt, Artificial Sequence
  Synthetic
ccacagaugcacaaaauaa

SEQ ID NO: 4489 - RNA, 19 nt, Artificial Sequence
  Synthetic
gcuugagauuggucacuua

SEQ ID NO: 4490 - RNA, 19 nt, Artificial Sequence
  Synthetic
guagaauggacaagugaca

SEQ ID NO: 4491 - RNA, 19 nt, Artificial Sequence
  Synthetic
cccgagaaccggagccuua

SEQ ID NO: 4492 - RNA, 19 nt, Artificial Sequence
  Synthetic
guuuagagcuaucccacua

SEQ ID NO: 4493 - RNA, 19 nt, Artificial Sequence
  Synthetic
caacaugaguagcgaacac

SEQ ID NO: 4494 - RNA, 19 nt, Artificial Sequence
  Synthetic
gaagagggcuguggucaua

SEQ ID NO: 4495 - RNA, 19 nt, Artificial Sequence
  Synthetic
ggaagagggagggagcaaa

SEQ ID NO: 4496 - RNA, 19 nt, Artificial Sequence
  Synthetic
agaagagggcuguggucau

SEQ ID NO: 4497 - RNA, 19 nt, Artificial Sequence
  Synthetic
cggaaacggaagccagaga

SEQ ID NO: 4498 - RNA, 19 nt, Artificial Sequence
  Synthetic
gaacacuuaaauuggguuu

SEQ ID NO: 4499 - RNA, 19 nt, Artificial Sequence
  Synthetic
uaauccugguuuagagcua

SEQ ID NO: 4500 - RNA, 19 nt, Artificial Sequence
  Synthetic
aaagugaugaggaggaaga

SEQ ID NO: 4501 - RNA, 19 nt, Artificial Sequence
  Synthetic
gaaaagagguccuugucau

SEQ ID NO: 4502 - RNA, 19 nt, Artificial Sequence
  Synthetic
caugaguagcgaacacuua

SEQ ID NO: 4503 - RNA, 19 nt, Artificial Sequence
  Synthetic
auacacaguuacagagauc

SEQ ID NO: 4504 - RNA, 19 nt, Artificial Sequence
  Synthetic
ggacagaccaagagaauaa

SEQ ID NO: 4505 - RNA, 19 nt, Artificial Sequence
  Synthetic
gcacauagcuggagccaau

SEQ ID NO: 4506 - RNA, 19 nt, Artificial Sequence
  Synthetic
ggacaugccuguugagaau

SEQ ID NO: 4507 - RNA, 19 nt, Artificial Sequence
  Synthetic
gggcaucacccaagagaaa

SEQ ID NO: 4508 - RNA, 19 nt, Artificial Sequence
  Synthetic
ggaaggaguaugagggaga

SEQ ID NO: 4509 - RNA, 19 nt, Artificial Sequence
  Synthetic
ggauaaaggaggaauaaga

SEQ ID NO: 4510 - RNA, 19 nt, Artificial Sequence
  Synthetic
ggaccaaccuguauaggaa

SEQ ID NO: 4511 - RNA, 19 nt, Artificial Sequence
  Synthetic
ccaaaaggauggaaguuaa

SEQ ID NO: 4512 - RNA, 19 nt, Artificial Sequence
  Synthetic
ggauggaaguuaagacuca

SEQ ID NO: 4513 - RNA, 19 nt, Artificial Sequence
  Synthetic
uagaggagauggaggagaa

SEQ ID NO: 4514 - RNA, 19 nt, Artificial Sequence
  Synthetic
ucgacaacuuugaggaaau

SEQ ID NO: 4515 - RNA, 19 nt, Artificial Sequence
  Synthetic
ggauagaauucuccaucaa

SEQ ID NO: 4516 - RNA, 19 nt, Artificial Sequence
  Synthetic
ggagagagcuguuuagguu

SEQ ID NO: 4517 - RNA, 19 nt, Artificial Sequence
  Synthetic
gcgaggaggaagaguucaa

SEQ ID NO: 4518 - RNA, 19 nt, Artificial Sequence
  Synthetic
ggaacgacgccgaggaagu

SEQ ID NO: 4519 - RNA, 19 nt, Artificial Sequence
  Synthetic
caggacagaccaagagaau

SEQ ID NO: 4520 - RNA, 19 nt, Artificial Sequence
  Synthetic
gugcauggcuguugccgua

SEQ ID NO: 4521 - RNA, 19 nt, Artificial Sequence
  Synthetic
agcgaaagcaugagcggaa

SEQ ID NO: 4522 - RNA, 19 nt, Artificial Sequence
  Synthetic
acaucaaccuggugaagau

SEQ ID NO: 4523 - RNA, 19 nt, Artificial Sequence
  Synthetic
gcaaugggaccucgguaua

SEQ ID NO: 4524 - RNA, 19 nt, Artificial Sequence
  Synthetic
gugaauauccagacuguuu

SEQ ID NO: 4525 - RNA, 19 nt, Artificial Sequence
  Synthetic
ggagcuagucucagugcaa

SEQ ID NO: 4526 - RNA, 19 nt, Artificial Sequence
  Synthetic
gccagaaccucuuggugua

SEQ ID NO: 4527 - RNA, 19 nt, Artificial Sequence
  Synthetic
agaccaaccuccaaugaau

SEQ ID NO: 4528 - RNA, 19 nt, Artificial Sequence
  Synthetic
ccaaaugcaucucagguuu

SEQ ID NO: 4529 - RNA, 19 nt, Artificial Sequence
  Synthetic
gcggauaaaggaggaauaa

SEQ ID NO: 4530 - RNA, 19 nt, Artificial Sequence
  Synthetic
gggacaaggucaguauuua

SEQ ID NO: 4531 - RNA, 19 nt, Artificial Sequence
  Synthetic
ucaagucaccugaggcaaa

SEQ ID NO: 4532 - RNA, 19 nt, Artificial Sequence
  Synthetic
ucuggaacuuucagugaua

SEQ ID NO: 4533 - RNA, 19 nt, Artificial Sequence
  Synthetic
gagagaggccaguuaauuu

SEQ ID NO: 4534 - RNA, 19 nt, Artificial Sequence
  Synthetic
aggaagaugaggaggaaga

SEQ ID NO: 4535 - RNA, 19 nt, Artificial Sequence
  Synthetic
ggaugaugaagaagaggaa

SEQ ID NO: 4536 - RNA, 19 nt, Artificial Sequence
  Synthetic
ggagggagguggagaagga

SEQ ID NO: 4537 - RNA, 19 nt, Artificial Sequence
  Synthetic
aagaagaggaagaagaaga

SEQ ID NO: 4538 - RNA, 19 nt, Artificial Sequence
  Synthetic
uggaugaguccgagagaga

SEQ ID NO: 4539 - RNA, 19 nt, Artificial Sequence
  Synthetic
ggguuauccaagagaggaa

SEQ ID NO: 4540 - RNA, 19 nt, Artificial Sequence
  Synthetic
aggaagaggaggaugauga

SEQ ID NO: 4541 - RNA, 19 nt, Artificial Sequence
  Synthetic
aggaggaagaggaggauga

SEQ ID NO: 4542 - RNA, 19 nt, Artificial Sequence
  Synthetic
ugaagaagaggaagaagaa

SEQ ID NO: 4543 - RNA, 19 nt, Artificial Sequence
  Synthetic
augaagaagaggaagaaga

SEQ ID NO: 4544 - RNA, 19 nt, Artificial Sequence
  Synthetic
gagaggaagaugaggagga

SEQ ID NO: 4545 - RNA, 19 nt, Artificial Sequence
  Synthetic
gaggagacacgcagagaca

SEQ ID NO: 4546 - RNA, 19 nt, Artificial Sequence
  Synthetic
ggaggugggaugugagaca

SEQ ID NO: 4547 - RNA, 19 nt, Artificial Sequence
  Synthetic
augaugaagaagaggaaga

SEQ ID NO: 4548 - RNA, 19 nt, Artificial Sequence
  Synthetic
agaggaggaugaugaagaa

SEQ ID NO: 4549 - RNA, 19 nt, Artificial Sequence
  Synthetic
gagggagggagguggagaa

SEQ ID NO: 4550 - RNA, 19 nt, Artificial Sequence
  Synthetic
gcaauuugaaugagaacca

SEQ ID NO: 4551 - RNA, 19 nt, Artificial Sequence
  Synthetic
ggaagaggaggaugaugaa

SEQ ID NO: 4552 - RNA, 19 nt, Artificial Sequence
  Synthetic
aagaagaagaggacagcca

SEQ ID NO: 4553 - RNA, 19 nt, Artificial Sequence
  Synthetic
cugaggaccaaguggaaga

SEQ ID NO: 4554 - RNA, 19 nt, Artificial Sequence
  Synthetic
aagaggaggaugaugaaga

SEQ ID NO: 4555 - RNA, 19 nt, Artificial Sequence
  Synthetic
aggaagaagaagaggacag

SEQ ID NO: 4556 - RNA, 19 nt, Artificial Sequence
  Synthetic
caagagaggaagaugagga

SEQ ID NO: 4557 - RNA, 19 nt, Artificial Sequence
  Synthetic
gcugaaguccugaagguca

SEQ ID NO: 4558 - RNA, 19 nt, Artificial Sequence
  Synthetic
cugaaguccugaaggucau

SEQ ID NO: 4559 - RNA, 19 nt, Artificial Sequence
  Synthetic
agaggaagaugaggaggaa

SEQ ID NO: 4560 - RNA, 19 nt, Artificial Sequence
  Synthetic
aggaggaugaugaagaaga

SEQ ID NO: 4561 - RNA, 19 nt, Artificial Sequence
  Synthetic
ggaccaaguggaagaccca

SEQ ID NO: 4562 - RNA, 19 nt, Artificial Sequence
  Synthetic
ccaaggaccgcaagaagau

SEQ ID NO: 4563 - RNA, 19 nt, Artificial Sequence
  Synthetic
gggauuugcccuucacaau

SEQ ID NO: 4564 - RNA, 19 nt, Artificial Sequence
  Synthetic
agacaaagacuaugguuua

SEQ ID NO: 4565 - RNA, 19 nt, Artificial Sequence
  Synthetic
caaacuagccagacaauua

SEQ ID NO: 4566 - RNA, 19 nt, Artificial Sequence
  Synthetic
ugauaaacuuagagacuga

SEQ ID NO: 4567 - RNA, 19 nt, Artificial Sequence
  Synthetic
ccacugauuuagaaacaaa

SEQ ID NO: 4568 - RNA, 19 nt, Artificial Sequence
  Synthetic
caguuuagcugcugaauuu

SEQ ID NO: 4569 - RNA, 19 nt, Artificial Sequence
  Synthetic
caggauauauagacugaua

SEQ ID NO: 4570 - RNA, 19 nt, Artificial Sequence
  Synthetic
gagacugauuagacugaaa

SEQ ID NO: 4571 - RNA, 19 nt, Artificial Sequence
  Synthetic
gaagaugccuguagugaca

SEQ ID NO: 4572 - RNA, 19 nt, Artificial Sequence
  Synthetic
cuucacaauucaugacuua

SEQ ID NO: 4573 - RNA, 19 nt, Artificial Sequence
  Synthetic
ggauaagacuuuaaacagu

SEQ ID NO: 4574 - RNA, 19 nt, Artificial Sequence
  Synthetic
gaaaauaguuugaguagca

SEQ ID NO: 4575 - RNA, 19 nt, Artificial Sequence
  Synthetic
ugguguaaauggauuguua

SEQ ID NO: 4576 - RNA, 19 nt, Artificial Sequence
  Synthetic
gguaugaacuagucaaaau

SEQ ID NO: 4577 - RNA, 19 nt, Artificial Sequence
  Synthetic
cagacaaagacuaugguuu

SEQ ID NO: 4578 - RNA, 19 nt, Artificial Sequence
  Synthetic
guggagaggaggauaguga

SEQ ID NO: 4579 - RNA, 19 nt, Artificial Sequence
  Synthetic
gugcaguauucuaaacauu

SEQ ID NO: 4580 - RNA, 19 nt, Artificial Sequence
  Synthetic
ugaugaugaugaagaugaa

SEQ ID NO: 4581 - RNA, 19 nt, Artificial Sequence
  Synthetic
ccuacaugaugaugaugaa

SEQ ID NO: 4582 - RNA, 19 nt, Artificial Sequence
  Synthetic
cuuagaaaguacccacaua

SEQ ID NO: 4583 - RNA, 19 nt, Artificial Sequence
  Synthetic
gaauguacagacagaagua

SEQ ID NO: 4584 - RNA, 19 nt, Artificial Sequence
  Synthetic
ugaugaagaugaagaaaug

SEQ ID NO: 4585 - RNA, 19 nt, Artificial Sequence
  Synthetic
guaucauccagcagacaaa

SEQ ID NO: 4586 - RNA, 19 nt, Artificial Sequence
  Synthetic
ucgacgaggagcugagcaa

SEQ ID NO: 4587 - RNA, 19 nt, Artificial Sequence
  Synthetic
gguaauugauaggguauga

SEQ ID NO: 4588 - RNA, 19 nt, Artificial Sequence
  Synthetic
gguuucauuucuagccaua

SEQ ID NO: 4589 - RNA, 19 nt, Artificial Sequence
  Synthetic
ggaaacagcaguauuugaa

SEQ ID NO: 4590 - RNA, 19 nt, Artificial Sequence
  Synthetic
caugaauacggaagaauca

SEQ ID NO: 4591 - RNA, 19 nt, Artificial Sequence
  Synthetic
ccaauugaacaacaggaua

SEQ ID NO: 4592 - RNA, 19 nt, Artificial Sequence
  Synthetic
aagaguuacuguugcauuu

SEQ ID NO: 4593 - RNA, 19 nt, Artificial Sequence
  Synthetic
augaaggacucaauaucaa

SEQ ID NO: 4594 - RNA, 19 nt, Artificial Sequence
  Synthetic
ggagaaagaagaugaauua

SEQ ID NO: 4595 - RNA, 19 nt, Artificial Sequence
  Synthetic
caacaaugauggucagaau

SEQ ID NO: 4596 - RNA, 19 nt, Artificial Sequence
  Synthetic
gggcaagucuuuugggaca

SEQ ID NO: 4597 - RNA, 19 nt, Artificial Sequence
  Synthetic
gaucauuguugguggaaaa

SEQ ID NO: 4598 - RNA, 19 nt, Artificial Sequence
  Synthetic
gaaagacacuugagaauuu

SEQ ID NO: 4599 - RNA, 19 nt, Artificial Sequence
  Synthetic
gaaaaguacuaucggaaua

SEQ ID NO: 4600 - RNA, 19 nt, Artificial Sequence
  Synthetic
aggcauuccuccugcaaua

SEQ ID NO: 4601 - RNA, 19 nt, Artificial Sequence
  Synthetic
gaaucaagaucuuaaguga

SEQ ID NO: 4602 - RNA, 19 nt, Artificial Sequence
  Synthetic
ccagaaugauccagguuuu

SEQ ID NO: 4603 - RNA, 19 nt, Artificial Sequence
  Synthetic
gaucuuaagugaagccuuu

SEQ ID NO: 4604 - RNA, 19 nt, Artificial Sequence
  Synthetic
acaaugauggucagaauua

SEQ ID NO: 4605 - RNA, 19 nt, Artificial Sequence
  Synthetic
aauuauagcuccggagaau

SEQ ID NO: 4606 - RNA, 19 nt, Artificial Sequence
  Synthetic
cggaauaacucugcaguga

SEQ ID NO: 4607 - RNA, 19 nt, Artificial Sequence
  Synthetic
gacgacauuuugugaauaa

SEQ ID NO: 4608 - RNA, 19 nt, Artificial Sequence
  Synthetic
caucauuaauggcuaacaa

SEQ ID NO: 4609 - RNA, 19 nt, Artificial Sequence
  Synthetic
gaauaacucugcagugaca

SEQ ID NO: 4610 - RNA, 19 nt, Artificial Sequence
  Synthetic
guguaugguggcacagaua

SEQ ID NO: 4611 - RNA, 19 nt, Artificial Sequence
  Synthetic
gauggaaagcuguguuaau

SEQ ID NO: 4612 - RNA, 19 nt, Artificial Sequence
  Synthetic
agacagaguuagagucaac

SEQ ID NO: 4613 - RNA, 19 nt, Artificial Sequence
  Synthetic
cuaaugagcugcaccagaa

SEQ ID NO: 4614 - RNA, 19 nt, Artificial Sequence
  Synthetic
ucuguaggaucuuaagaaa

SEQ ID NO: 4615 - RNA, 19 nt, Artificial Sequence
  Synthetic
aaagaaagacacuugagaa

SEQ ID NO: 4616 - RNA, 19 nt, Artificial Sequence
  Synthetic
gggacaacaaugaugguca

SEQ ID NO: 4617 - RNA, 19 nt, Artificial Sequence
  Synthetic
ucugguaacucauggguuu

SEQ ID NO: 4618 - RNA, 19 nt, Artificial Sequence
  Synthetic
caagaagcgcguuguguuu

SEQ ID NO: 4619 - RNA, 19 nt, Artificial Sequence
  Synthetic
cugaaaucaugucucaaua

SEQ ID NO: 4620 - RNA, 19 nt, Artificial Sequence
  Synthetic
aagccaaaucacagaauga

SEQ ID NO: 4621 - RNA, 19 nt, Artificial Sequence
  Synthetic
cagaagaaccagcguggga

SEQ ID NO: 4622 - RNA, 19 nt, Artificial Sequence
  Synthetic
ggaugugacuuguuuugaa

SEQ ID NO: 4623 - RNA, 19 nt, Artificial Sequence
  Synthetic
gcaagagcgaacagugaca

SEQ ID NO: 4624 - RNA, 19 nt, Artificial Sequence
  Synthetic
caggaauauucucgauuua

SEQ ID NO: 4625 - RNA, 19 nt, Artificial Sequence
  Synthetic
ggagcaagguggcgaacca

SEQ ID NO: 4626 - RNA, 19 nt, Artificial Sequence
  Synthetic
cugaaugugucucuguaaa

SEQ ID NO: 4627 - RNA, 19 nt, Artificial Sequence
  Synthetic
ccgaguacugggacaacaa

SEQ ID NO: 4628 - RNA, 19 nt, Artificial Sequence
  Synthetic
uggcacaggucaagguguu

SEQ ID NO: 4629 - RNA, 19 nt, Artificial Sequence
  Synthetic
cggaggaccuggacaagga

SEQ ID NO: 4630 - RNA, 19 nt, Artificial Sequence
  Synthetic
gcaacguggccuucgagaa

SEQ ID NO: 4631 - RNA, 19 nt, Artificial Sequence
  Synthetic
guacggugcgcgugugcaa

SEQ ID NO: 4632 - RNA, 19 nt, Artificial Sequence
  Synthetic
gaagagagcuggauccacu

SEQ ID NO: 4633 - RNA, 19 nt, Artificial Sequence
  Synthetic
agaaggccgaguuguguaa

SEQ ID NO: 4634 - RNA, 19 nt, Artificial Sequence
  Synthetic
cagaaggccgaguugugua

SEQ ID NO: 4635 - RNA, 19 nt, Artificial Sequence
  Synthetic
ucaggaauauucucgauuu

SEQ ID NO: 4636 - RNA, 19 nt, Artificial Sequence
  Synthetic
uugcauguguccugaaugu

SEQ ID NO: 4637 - RNA, 19 nt, Artificial Sequence
  Synthetic
cgaguuguguaaugaguug

SEQ ID NO: 4638 - RNA, 19 nt, Artificial Sequence
  Synthetic
ccucaggaauauucucgau

SEQ ID NO: 4639 - RNA, 19 nt, Artificial Sequence
  Synthetic
cugagucacuugucuaaaa

SEQ ID NO: 4640 - RNA, 19 nt, Artificial Sequence
  Synthetic
gaaugugucucuguaaaca

SEQ ID NO: 4641 - RNA, 19 nt, Artificial Sequence
  Synthetic
gcauguguccugaaugugu

SEQ ID NO: 4642 - RNA, 19 nt, Artificial Sequence
  Synthetic
acaucuaucugguuguucu

SEQ ID NO: 4643 - RNA, 19 nt, Artificial Sequence
  Synthetic
ugucgcggcucgcaaucaa

SEQ ID NO: 4644 - RNA, 19 nt, Artificial Sequence
  Synthetic
aggccgaguuguguaauga

SEQ ID NO: 4645 - RNA, 19 nt, Artificial Sequence
  Synthetic
uggcugugcgcuacacuuu

SEQ ID NO: 4646 - RNA, 19 nt, Artificial Sequence
  Synthetic
caacgaccaccgagacuac

SEQ ID NO: 4647 - RNA, 19 nt, Artificial Sequence
  Synthetic
gccagaaggccgaguugug

SEQ ID NO: 4648 - RNA, 19 nt, Artificial Sequence
  Synthetic
cagauacgguggacucucu

SEQ ID NO: 4649 - RNA, 19 nt, Artificial Sequence
  Synthetic
gcacaggucaagguguuca

SEQ ID NO: 4650 - RNA, 19 nt, Artificial Sequence
  Synthetic
gccgaguuguguaaugagu

SEQ ID NO: 4651 - RNA, 19 nt, Artificial Sequence
  Synthetic
cauccugucuucuacuuga

SEQ ID NO: 4652 - RNA, 19 nt, Artificial Sequence
  Synthetic
gucgggaggucgucucuca

SEQ ID NO: 4653 - RNA, 19 nt, Artificial Sequence
  Synthetic
cugcugggcucucacaucu

SEQ ID NO: 4654 - RNA, 19 nt, Artificial Sequence
  Synthetic
ggacagagaugcagaggau

SEQ ID NO: 4655 - RNA, 19 nt, Artificial Sequence
  Synthetic
cuuuuaaucugcugagaaa

SEQ ID NO: 4656 - RNA, 19 nt, Artificial Sequence
  Synthetic
uaaccaaccuggagaguuu

SEQ ID NO: 4657 - RNA, 19 nt, Artificial Sequence
  Synthetic
gauugaaggauuugaggua

SEQ ID NO: 4658 - RNA, 19 nt, Artificial Sequence
  Synthetic
gauuugagguacugaagaa

SEQ ID NO: 4659 - RNA, 19 nt, Artificial Sequence
  Synthetic
cugcaagaguucuggauga

SEQ ID NO: 4660 - RNA, 19 nt, Artificial Sequence
  Synthetic
caguguaccuggagcggaa

SEQ ID NO: 4661 - RNA, 19 nt, Artificial Sequence
  Synthetic
ccaucaaccuggacagaga

SEQ ID NO: 4662 - RNA, 19 nt, Artificial Sequence
  Synthetic
uaacagagcuggagauucu

SEQ ID NO: 4663 - RNA, 19 nt, Artificial Sequence
  Synthetic
agggaagauugaaggauuu

SEQ ID NO: 4664 - RNA, 19 nt, Artificial Sequence
  Synthetic
gaacagagccugaaggaug

SEQ ID NO: 4665 - RNA, 19 nt, Artificial Sequence
  Synthetic
caauaaaggcacugacgau

SEQ ID NO: 4666 - RNA, 19 nt, Artificial Sequence
  Synthetic
ucacaaacccaauggcaau

SEQ ID NO: 4667 - RNA, 19 nt, Artificial Sequence
  Synthetic
ggacauugcaucaaauaga

SEQ ID NO: 4668 - RNA, 19 nt, Artificial Sequence
  Synthetic
aggagaugauggagguuga

SEQ ID NO: 4669 - RNA, 19 nt, Artificial Sequence
  Synthetic
cgaugaagaagggaagaaa

SEQ ID NO: 4670 - RNA, 19 nt, Artificial Sequence
  Synthetic
gcuggagauucuagauauu

SEQ ID NO: 4671 - RNA, 19 nt, Artificial Sequence
  Synthetic
ggaggaggacccagaagaa

SEQ ID NO: 4672 - RNA, 19 nt, Artificial Sequence
  Synthetic
uaacagagcugcaagaguu

SEQ ID NO: 4673 - RNA, 19 nt, Artificial Sequence
  Synthetic
uagggaagauugaaggauu

SEQ ID NO: 4674 - RNA, 19 nt, Artificial Sequence
  Synthetic
ucgagggccuggagaacaa

SEQ ID NO: 4675 - RNA, 19 nt, Artificial Sequence
  Synthetic
cagcaacagucgcaggaga

SEQ ID NO: 4676 - RNA, 19 nt, Artificial Sequence
  Synthetic
gaagaagggaagaaacaca

SEQ ID NO: 4677 - RNA, 19 nt, Artificial Sequence
  Synthetic
ugaagaaagugaagacucu

SEQ ID NO: 4678 - RNA, 19 nt, Artificial Sequence
  Synthetic
gcgaugaagaagggaagaa

SEQ ID NO: 4679 - RNA, 19 nt, Artificial Sequence
  Synthetic
caaguugacacgacugaaa

SEQ ID NO: 4680 - RNA, 19 nt, Artificial Sequence
  Synthetic
uggaggagcuacagagucu

SEQ ID NO: 4681 - RNA, 19 nt, Artificial Sequence
  Synthetic
augcagaggauguugauuu

SEQ ID NO: 4682 - RNA, 19 nt, Artificial Sequence
  Synthetic
ugaagaauccggcgaugaa

SEQ ID NO: 4683 - RNA, 19 nt, Artificial Sequence
  Synthetic
ucuucuuggucaacaauaa

SEQ ID NO: 4684 - RNA, 19 nt, Artificial Sequence
  Synthetic
ccaaagaggaagaggaaga

SEQ ID NO: 4685 - RNA, 19 nt, Artificial Sequence
  Synthetic
gcaguuaagcugagguuua

SEQ ID NO: 4686 - RNA, 19 nt, Artificial Sequence
  Synthetic
cuaaugaacuagggagaaa

SEQ ID NO: 4687 - RNA, 19 nt, Artificial Sequence
  Synthetic
gaagauggguggagaggau

SEQ ID NO: 4688 - RNA, 19 nt, Artificial Sequence
  Synthetic
ugauagaucucaacaguaa

SEQ ID NO: 4689 - RNA, 19 nt, Artificial Sequence
  Synthetic
gcucaaaggcgcucacuua

SEQ ID NO: 4690 - RNA, 19 nt, Artificial Sequence
  Synthetic
gcgagaagccucagacauu

SEQ ID NO: 4691 - RNA, 19 nt, Artificial Sequence
  Synthetic
agacacagguuuauaguuu

SEQ ID NO: 4692 - RNA, 19 nt, Artificial Sequence
  Synthetic
gagacaaacuaauugagaa

SEQ ID NO: 4693 - RNA, 19 nt, Artificial Sequence
  Synthetic
aagcugagguuuaaacuaa

SEQ ID NO: 4694 - RNA, 19 nt, Artificial Sequence
  Synthetic
auucagagcuccaagacua

SEQ ID NO: 4695 - RNA, 19 nt, Artificial Sequence
  Synthetic
gaccaaagaggaagaggaa

SEQ ID NO: 4696 - RNA, 19 nt, Artificial Sequence
  Synthetic
uaaaugaacccaagaagaa

SEQ ID NO: 4697 - RNA, 19 nt, Artificial Sequence
  Synthetic
gaagagaguuuuccugaua

SEQ ID NO: 4698 - RNA, 19 nt, Artificial Sequence
  Synthetic
gcuuagaauucugcaguua

SEQ ID NO: 4699 - RNA, 19 nt, Artificial Sequence
  Synthetic
ggaaaagauuuguuuggaa

SEQ ID NO: 4700 - RNA, 19 nt, Artificial Sequence
  Synthetic
gggugcaggcugugaauuu

SEQ ID NO: 4701 - RNA, 19 nt, Artificial Sequence
  Synthetic
guaaaugaacccaagaaga

SEQ ID NO: 4702 - RNA, 19 nt, Artificial Sequence
  Synthetic
agucaaaggagacaaacua

SEQ ID NO: 4703 - RNA, 19 nt, Artificial Sequence
  Synthetic
ggguugaaauagcccauaa

SEQ ID NO: 4704 - RNA, 19 nt, Artificial Sequence
  Synthetic
ggaaguaacuggugucucu

SEQ ID NO: 4705 - RNA, 19 nt, Artificial Sequence
  Synthetic
uagcagaaggguugccaua

SEQ ID NO: 4706 - RNA, 19 nt, Artificial Sequence
  Synthetic
ugccauagacacagguuua

SEQ ID NO: 4707 - RNA, 19 nt, Artificial Sequence
  Synthetic
caaauaaagaugcccuaaa

SEQ ID NO: 4708 - RNA, 19 nt, Artificial Sequence
  Synthetic
gagacaaaguuaggaaaca

SEQ ID NO: 4709 - RNA, 19 nt, Artificial Sequence
  Synthetic
uuaccauugaggagggaaa

SEQ ID NO: 4710 - RNA, 19 nt, Artificial Sequence
  Synthetic
aacccaagaagaagaaaua

SEQ ID NO: 4711 - RNA, 19 nt, Artificial Sequence
  Synthetic
gcagaaggguugccauaga

SEQ ID NO: 4712 - RNA, 19 nt, Artificial Sequence
  Synthetic
auccagagcuguagagguu

SEQ ID NO: 4713 - RNA, 19 nt, Artificial Sequence
  Synthetic
uaacaaacauaggagacaa

SEQ ID NO: 4714 - RNA, 19 nt, Artificial Sequence
  Synthetic
cuaaagaaauccugacaaa

SEQ ID NO: 4715 - RNA, 19 nt, Artificial Sequence
  Synthetic
guuuagaauugguggcaaa

SEQ ID NO: 4716 - RNA, 19 nt, Artificial Sequence
  Synthetic
cagauuaacuucaggauuu

SEQ ID NO: 4717 - RNA, 19 nt, Artificial Sequence
  Synthetic
ggaaaugggaagagcaaca

SEQ ID NO: 4718 - RNA, 19 nt, Artificial Sequence
  Synthetic
cgacauuguuggucaagaa

SEQ ID NO: 4719 - RNA, 19 nt, Artificial Sequence
  Synthetic
gcgagaaggcuaaagaaau

SEQ ID NO: 4720 - RNA, 19 nt, Artificial Sequence
  Synthetic
agcuagugauggagggaua

SEQ ID NO: 4721 - RNA, 19 nt, Artificial Sequence
  Synthetic
gcaaaucaccagauacaaa

SEQ ID NO: 4722 - RNA, 19 nt, Artificial Sequence
  Synthetic
gcaagauauuucugagaca

SEQ ID NO: 4723 - RNA, 19 nt, Artificial Sequence
  Synthetic
agauaaggauagcagcaaa

SEQ ID NO: 4724 - RNA, 19 nt, Artificial Sequence
  Synthetic
cgagaaggcuaaagaaauc

SEQ ID NO: 4725 - RNA, 19 nt, Artificial Sequence
  Synthetic
ggauauaacuggugccaug

SEQ ID NO: 4726 - RNA, 19 nt, Artificial Sequence
  Synthetic
gggcaagacuggugcuguu

SEQ ID NO: 4727 - RNA, 19 nt, Artificial Sequence
  Synthetic
cugagaaggucaaauuuua

SEQ ID NO: 4728 - RNA, 19 nt, Artificial Sequence
  Synthetic
gggaagagcaacaguaacu

SEQ ID NO: 4729 - RNA, 19 nt, Artificial Sequence
  Synthetic
cugagagacugcagauaau

SEQ ID NO: 4730 - RNA, 19 nt, Artificial Sequence
  Synthetic
ucacacaaguuuaugguuu

SEQ ID NO: 4731 - RNA, 19 nt, Artificial Sequence
  Synthetic
gcuuguagcucuuaagguu

SEQ ID NO: 4732 - RNA, 19 nt, Artificial Sequence
  Synthetic
ggaauguaguaacgauuuu

SEQ ID NO: 4733 - RNA, 19 nt, Artificial Sequence
  Synthetic
ucauggaacuguuuagaau

SEQ ID NO: 4734 - RNA, 19 nt, Artificial Sequence
  Synthetic
uggcaaaucaccagauaca

SEQ ID NO: 4735 - RNA, 19 nt, Artificial Sequence
  Synthetic
gggagauuauguugacaga

SEQ ID NO: 4736 - RNA, 19 nt, Artificial Sequence
  Synthetic
cagcaugacuguagauaag

SEQ ID NO: 4737 - RNA, 19 nt, Artificial Sequence
  Synthetic
cugcagauaauaagaugua

SEQ ID NO: 4738 - RNA, 19 nt, Artificial Sequence
  Synthetic
aaucaagggcacuacauaa

SEQ ID NO: 4739 - RNA, 19 nt, Artificial Sequence
  Synthetic
cuacauaaccucucuggua

SEQ ID NO: 4740 - RNA, 19 nt, Artificial Sequence
  Synthetic
gagagacugcagauaauaa

SEQ ID NO: 4741 - RNA, 19 nt, Artificial Sequence
  Synthetic
ggaucgagcagcugaacga

SEQ ID NO: 4742 - RNA, 19 nt, Artificial Sequence
  Synthetic
uuuguagacuuguagguaa

SEQ ID NO: 4743 - RNA, 19 nt, Artificial Sequence
  Synthetic
ggaucauaucagagcacuu

SEQ ID NO: 4744 - RNA, 19 nt, Artificial Sequence
  Synthetic
gcgagaaggcaaaggaaau

SEQ ID NO: 4745 - RNA, 19 nt, Artificial Sequence
  Synthetic
cuuuagaauugguggaaaa

SEQ ID NO: 4746 - RNA, 19 nt, Artificial Sequence
  Synthetic
cuauguagacagaggauau

SEQ ID NO: 4747 - RNA, 19 nt, Artificial Sequence
  Synthetic
uuuaguagauggacagaua

SEQ ID NO: 4748 - RNA, 19 nt, Artificial Sequence
  Synthetic
uagcauuaaaggugcguua

SEQ ID NO: 4749 - RNA, 19 nt, Artificial Sequence
  Synthetic
cuuuguauguggaaguaua

SEQ ID NO: 4750 - RNA, 19 nt, Artificial Sequence
  Synthetic
ggaauuagaugacacuuua

SEQ ID NO: 4751 - RNA, 19 nt, Artificial Sequence
  Synthetic
ucacgaaagccgacaaauu

SEQ ID NO: 4752 - RNA, 19 nt, Artificial Sequence
  Synthetic
agcuuguaauggagggaua

SEQ ID NO: 4753 - RNA, 19 nt, Artificial Sequence
  Synthetic
ccauagacacacuggauca

SEQ ID NO: 4754 - RNA, 19 nt, Artificial Sequence
  Synthetic
cgacaaauuacccaaguau

SEQ ID NO: 4755 - RNA, 19 nt, Artificial Sequence
  Synthetic
cagcuuuaguagauggaca

SEQ ID NO: 4756 - RNA, 19 nt, Artificial Sequence
  Synthetic
guaagcagcugaacgagaa

SEQ ID NO: 4757 - RNA, 19 nt, Artificial Sequence
  Synthetic
gaaaaucaccggauacaaa

SEQ ID NO: 4758 - RNA, 19 nt, Artificial Sequence
  Synthetic
acuuacagcuuuaguagau

SEQ ID NO: 4759 - RNA, 19 nt, Artificial Sequence
  Synthetic
cgagaaggcaaaggaaauu

SEQ ID NO: 4760 - RNA, 19 nt, Artificial Sequence
  Synthetic
guuuaacuggcauggauua

SEQ ID NO: 4761 - RNA, 19 nt, Artificial Sequence
  Synthetic
cacgaaagccgacaaauua

SEQ ID NO: 4762 - RNA, 19 nt, Artificial Sequence
  Synthetic
ccgacaaauuacccaagua

SEQ ID NO: 4763 - RNA, 19 nt, Artificial Sequence
  Synthetic
ugcgagaaggcaaaggaaa

SEQ ID NO: 4764 - RNA, 19 nt, Artificial Sequence
  Synthetic
uggaauuagaugacacuuu

SEQ ID NO: 4765 - RNA, 19 nt, Artificial Sequence
  Synthetic
agacagaggauauuauuca

SEQ ID NO: 4766 - RNA, 19 nt, Artificial Sequence
  Synthetic
augaugaaugucugcgaaa

SEQ ID NO: 4767 - RNA, 19 nt, Artificial Sequence
  Synthetic
gacaaauuacccaaguaua

SEQ ID NO: 4768 - RNA, 19 nt, Artificial Sequence
  Synthetic
ccagaacgcauuacaauau

SEQ ID NO: 4769 - RNA, 19 nt, Artificial Sequence
  Synthetic
gggucgagcagcugaacga

SEQ ID NO: 4770 - RNA, 19 nt, Artificial Sequence
  Synthetic
acuacuuauucauggguga

SEQ ID NO: 4771 - RNA, 19 nt, Artificial Sequence
  Synthetic
guggagaugugcaugguca

SEQ ID NO: 4772 - RNA, 19 nt, Artificial Sequence
  Synthetic
gaugaaugucugcgaaagu

SEQ ID NO: 4773 - RNA, 19 nt, Artificial Sequence
  Synthetic
uggcauggauuaauagagu

SEQ ID NO: 4774 - RNA, 19 nt, Artificial Sequence
  Synthetic
ugaagaagcuaguggaaaa

SEQ ID NO: 4775 - RNA, 19 nt, Artificial Sequence
  Synthetic
gucaaagaguucugugaaa

SEQ ID NO: 4776 - RNA, 19 nt, Artificial Sequence
  Synthetic
acagagaaauaaaggucua

SEQ ID NO: 4777 - RNA, 19 nt, Artificial Sequence
  Synthetic
uggacaacgucaagaguga

SEQ ID NO: 4778 - RNA, 19 nt, Artificial Sequence
  Synthetic
ggaugagugcccugaggua

SEQ ID NO: 4779 - RNA, 19 nt, Artificial Sequence
  Synthetic
gagaaauaaaggucuagaa

SEQ ID NO: 4780 - RNA, 19 nt, Artificial Sequence
  Synthetic
gcuacaugguggcugacaa

SEQ ID NO: 4781 - RNA, 19 nt, Artificial Sequence
  Synthetic
ccacaaggucaaagaguuc

SEQ ID NO: 4782 - RNA, 19 nt, Artificial Sequence
  Synthetic
agacaguggugcgggacaa

SEQ ID NO: 4783 - RNA, 19 nt, Artificial Sequence
  Synthetic
aggauguggacgucaaaua

SEQ ID NO: 4784 - RNA, 19 nt, Artificial Sequence
  Synthetic
cugaagaagcuaguggaaa

SEQ ID NO: 4785 - RNA, 19 nt, Artificial Sequence
  Synthetic
gaguggaguucuuugauga

SEQ ID NO: 4786 - RNA, 19 nt, Artificial Sequence
  Synthetic
ggucaaagaguucugugaa

SEQ ID NO: 4787 - RNA, 19 nt, Artificial Sequence
  Synthetic
uggcucagcugaaggauga

SEQ ID NO: 4788 - RNA, 19 nt, Artificial Sequence
  Synthetic
uggccuggcuuguggauca

SEQ ID NO: 4789 - RNA, 19 nt, Artificial Sequence
  Synthetic
ccugaagaagcuaguggaa

SEQ ID NO: 4790 - RNA, 19 nt, Artificial Sequence
  Synthetic
ucacagagcuccagaaagc

SEQ ID NO: 4791 - RNA, 19 nt, Artificial Sequence
  Synthetic
gcuuguggaucauguauau

SEQ ID NO: 4792 - RNA, 19 nt, Artificial Sequence
  Synthetic
gaaauaaaggucuagaagu

SEQ ID NO: 4793 - RNA, 19 nt, Artificial Sequence
  Synthetic
gcaucaaugugcugucuga

SEQ ID NO: 4794 - RNA, 19 nt, Artificial Sequence
  Synthetic
uggcagaacagcugggaac

SEQ ID NO: 4795 - RNA, 19 nt, Artificial Sequence
  Synthetic
guucacagagcuccagaaa

SEQ ID NO: 4796 - RNA, 19 nt, Artificial Sequence
  Synthetic
uggccaagucucugcagaa

SEQ ID NO: 4797 - RNA, 19 nt, Artificial Sequence
  Synthetic
ggguuggacaggacaguga

SEQ ID NO: 4798 - RNA, 19 nt, Artificial Sequence
  Synthetic
gggacaaggcaguggaguc

SEQ ID NO: 4799 - RNA, 19 nt, Artificial Sequence
  Synthetic
ugaacgaggugauuggcau

SEQ ID NO: 4800 - RNA, 19 nt, Artificial Sequence
  Synthetic
ccaaggugcuggagcugga

SEQ ID NO: 4801 - RNA, 19 nt, Artificial Sequence
  Synthetic
ugaaagacugugaggccga

SEQ ID NO: 4802 - RNA, 19 nt, Artificial Sequence
  Synthetic
uccagaaccugaugaaaga

SEQ ID NO: 4803 - RNA, 19 nt, Artificial Sequence
  Synthetic
ccaccagcaaccugaagaa

SEQ ID NO: 4804 - RNA, 19 nt, Artificial Sequence
  Synthetic
ggaaauaacuacuaagcaa

SEQ ID NO: 4805 - RNA, 19 nt, Artificial Sequence
  Synthetic
gcaaauuaauagugaggaa

SEQ ID NO: 4806 - RNA, 19 nt, Artificial Sequence
  Synthetic
ggaauuagacagugugaaa

SEQ ID NO: 4807 - RNA, 19 nt, Artificial Sequence
  Synthetic
cauaauaggugcucaauaa

SEQ ID NO: 4808 - RNA, 19 nt, Artificial Sequence
  Synthetic
gaguuaagcugaagaguuu

SEQ ID NO: 4809 - RNA, 19 nt, Artificial Sequence
  Synthetic
gcaacaacuuagaagaaau

SEQ ID NO: 4810 - RNA, 19 nt, Artificial Sequence
  Synthetic
gaaguuaggucaagaugaa

SEQ ID NO: 4811 - RNA, 19 nt, Artificial Sequence
  Synthetic
gggugauacuggagucuua

SEQ ID NO: 4812 - RNA, 19 nt, Artificial Sequence
  Synthetic
cgggagacauguugagauu

SEQ ID NO: 4813 - RNA, 19 nt, Artificial Sequence
  Synthetic
gauaaugaguuaagcugaa

SEQ ID NO: 4814 - RNA, 19 nt, Artificial Sequence
  Synthetic
gcauuagucucaugugaaa

SEQ ID NO: 4815 - RNA, 19 nt, Artificial Sequence
  Synthetic
gaagauagagagaccauaa

SEQ ID NO: 4816 - RNA, 19 nt, Artificial Sequence
  Synthetic
ggguggagauggagaugau

SEQ ID NO: 4817 - RNA, 19 nt, Artificial Sequence
  Synthetic
gugaauaugugguuucuaa

SEQ ID NO: 4818 - RNA, 19 nt, Artificial Sequence
  Synthetic
aggaugaccuugagacuuu

SEQ ID NO: 4819 - RNA, 19 nt, Artificial Sequence
  Synthetic
agaaaggacccgaagugaa

SEQ ID NO: 4820 - RNA, 19 nt, Artificial Sequence
  Synthetic
gaaaggacccgaagugaau

SEQ ID NO: 4821 - RNA, 19 nt, Artificial Sequence
  Synthetic
ggauaauacugugcagauu

SEQ ID NO: 4822 - RNA, 19 nt, Artificial Sequence
  Synthetic
ggccaagaauuaaguauuu

SEQ ID NO: 4823 - RNA, 19 nt, Artificial Sequence
  Synthetic
gauagagagaccauaauua

SEQ ID NO: 4824 - RNA, 19 nt, Artificial Sequence
  Synthetic
ccaacaaccucaugaaacu

SEQ ID NO: 4825 - RNA, 19 nt, Artificial Sequence
  Synthetic
ccucuaagacuuuguauau

SEQ ID NO: 4826 - RNA, 19 nt, Artificial Sequence
  Synthetic
acaagcagcagaagauaaa

SEQ ID NO: 4827 - RNA, 19 nt, Artificial Sequence
  Synthetic
aaguguuaguaauggcaaa

SEQ ID NO: 4828 - RNA, 19 nt, Artificial Sequence
  Synthetic
cuaacgaggucuuguugaa

SEQ ID NO: 4829 - RNA, 19 nt, Artificial Sequence
  Synthetic
gaggacgaauagaguuuaa

SEQ ID NO: 4830 - RNA, 19 nt, Artificial Sequence
  Synthetic
gauccuaauuacuugcaua

SEQ ID NO: 4831 - RNA, 19 nt, Artificial Sequence
  Synthetic
caggagaccaaguagcaaa

SEQ ID NO: 4832 - RNA, 19 nt, Artificial Sequence
  Synthetic
ccuaauuacuugcauagaa

SEQ ID NO: 4833 - RNA, 19 nt, Artificial Sequence
  Synthetic
ggugaaacgcuuagcaagu

SEQ ID NO: 4834 - RNA, 19 nt, Artificial Sequence
  Synthetic
gcgaaagaaagaugaaaua

SEQ ID NO: 4835 - RNA, 19 nt, Artificial Sequence
  Synthetic
gcagaugauuugcggauua

SEQ ID NO: 4836 - RNA, 19 nt, Artificial Sequence
  Synthetic
ucagaauguuugacagaaa

SEQ ID NO: 4837 - RNA, 19 nt, Artificial Sequence
  Synthetic
agauaaaggugguagaguu

SEQ ID NO: 4838 - RNA, 19 nt, Artificial Sequence
  Synthetic
cuagaagcaucgcgggaaa

SEQ ID NO: 4839 - RNA, 19 nt, Artificial Sequence
  Synthetic
agacauaacccuagaagca

SEQ ID NO: 4840 - RNA, 19 nt, Artificial Sequence
  Synthetic
cagcagaauuucauccaaa

SEQ ID NO: 4841 - RNA, 19 nt, Artificial Sequence
  Synthetic
gcacugaaaauaaggaaaa

SEQ ID NO: 4842 - RNA, 19 nt, Artificial Sequence
  Synthetic
aaacacaaagcgagacaua

SEQ ID NO: 4843 - RNA, 19 nt, Artificial Sequence
  Synthetic
ggagaaagcucuguggauu

SEQ ID NO: 4844 - RNA, 19 nt, Artificial Sequence
  Synthetic
gugcaaguggcaagcgaaa

SEQ ID NO: 4845 - RNA, 19 nt, Artificial Sequence
  Synthetic
caugaauaccucagaagua

SEQ ID NO: 4846 - RNA, 19 nt, Artificial Sequence
  Synthetic
ggacuagauuggacuguau

SEQ ID NO: 4847 - RNA, 19 nt, Artificial Sequence
  Synthetic
gauuacagcagcagaauuu

SEQ ID NO: 4848 - RNA, 19 nt, Artificial Sequence
  Synthetic
agaugaugauguagcagaa

SEQ ID NO: 4849 - RNA, 19 nt, Artificial Sequence
  Synthetic
gauggaagguauagagauc

SEQ ID NO: 4850 - RNA, 19 nt, Artificial Sequence
  Synthetic
acuagcaacaggagauaaa

SEQ ID NO: 4851 - RNA, 19 nt, Artificial Sequence
  Synthetic
ccaaacagcuguaacacau

SEQ ID NO: 4852 - RNA, 19 nt, Artificial Sequence
  Synthetic
gaaaggagcaguagaugau

SEQ ID NO: 4853 - RNA, 19 nt, Artificial Sequence
  Synthetic
uaaaggaacuauucggcua

SEQ ID NO: 4854 - RNA, 19 nt, Artificial Sequence
  Synthetic
aaacauaccaggugcauga

SEQ ID NO: 4855 - RNA, 19 nt, Artificial Sequence
  Synthetic
agacaggaguuuuaacauu

SEQ ID NO: 4856 - RNA, 19 nt, Artificial Sequence
  Synthetic
caaaagaccagaaggguau

SEQ ID NO: 4857 - RNA, 19 nt, Artificial Sequence
  Synthetic
ggugaaaggagcaguagau

SEQ ID NO: 4858 - RNA, 19 nt, Artificial Sequence
  Synthetic
ccucauuacuguaucauuu

SEQ ID NO: 4859 - RNA, 19 nt, Artificial Sequence
  Synthetic
ggccaguccacgaagaaua

SEQ ID NO: 4860 - RNA, 19 nt, Artificial Sequence
  Synthetic
cauaccaggugcaugaaua

SEQ ID NO: 4861 - RNA, 19 nt, Artificial Sequence
  Synthetic
ggugauuacagcagcagaa

SEQ ID NO: 4862 - RNA, 19 nt, Artificial Sequence
  Synthetic
ggguauaacuugaaagagg

SEQ ID NO: 4863 - RNA, 19 nt, Artificial Sequence
  Synthetic
uaugaugacuagagacuau

SEQ ID NO: 4864 - RNA, 19 nt, Artificial Sequence
  Synthetic
ccugaagaguuuagaaaua

SEQ ID NO: 4865 - RNA, 19 nt, Artificial Sequence
  Synthetic
gcugaugaccugaggauua

SEQ ID NO: 4866 - RNA, 19 nt, Artificial Sequence
  Synthetic
cauuuaagccagagauuua

SEQ ID NO: 4867 - RNA, 19 nt, Artificial Sequence
  Synthetic
ggaaaugauuggaauagaa

SEQ ID NO: 4868 - RNA, 19 nt, Artificial Sequence
  Synthetic
agaaacagccugagaauuu

SEQ ID NO: 4869 - RNA, 19 nt, Artificial Sequence
  Synthetic
cuugaggcuucgagggaaa

SEQ ID NO: 4870 - RNA, 19 nt, Artificial Sequence
  Synthetic
ggacagaaagagagcacuu

SEQ ID NO: 4871 - RNA, 19 nt, Artificial Sequence
  Synthetic
aacgagagcaggagaguaa

SEQ ID NO: 4872 - RNA, 19 nt, Artificial Sequence
  Synthetic
ccuauggaacuuugaaaua

SEQ ID NO: 4873 - RNA, 19 nt, Artificial Sequence
  Synthetic
ggacauugauacccgcaaa

SEQ ID NO: 4874 - RNA, 19 nt, Artificial Sequence
  Synthetic
ucgauuaccugaagaguuu

SEQ ID NO: 4875 - RNA, 19 nt, Artificial Sequence
  Synthetic
agaagaggaugcagaauga

SEQ ID NO: 4876 - RNA, 19 nt, Artificial Sequence
  Synthetic
gaaaacugguucuggguua

SEQ ID NO: 4877 - RNA, 19 nt, Artificial Sequence
  Synthetic
caaccacacgggagaauua

SEQ ID NO: 4878 - RNA, 19 nt, Artificial Sequence
  Synthetic
gaaaugaacuguggggaaa

SEQ ID NO: 4879 - RNA, 19 nt, Artificial Sequence
  Synthetic
ucaggauguucgacagaaa

SEQ ID NO: 4880 - RNA, 19 nt, Artificial Sequence
  Synthetic
aguugaggauccagauuua

SEQ ID NO: 4881 - RNA, 19 nt, Artificial Sequence
  Synthetic
gggagaauuacuagcgaca

SEQ ID NO: 4882 - RNA, 19 nt, Artificial Sequence
  Synthetic
uuuguaagcuccauagaaa

SEQ ID NO: 4883 - RNA, 19 nt, Artificial Sequence
  Synthetic
ggaaagucagcgagcguga

SEQ ID NO: 4884 - RNA, 19 nt, Artificial Sequence
  Synthetic
ggagaaaagagauaaguuu

SEQ ID NO: 4885 - RNA, 19 nt, Artificial Sequence
  Synthetic
ccagagauuuauugcauga

SEQ ID NO: 4886 - RNA, 19 nt, Artificial Sequence
  Synthetic
cgaccgaagcugacauuau

SEQ ID NO: 4887 - RNA, 19 nt, Artificial Sequence
  Synthetic
aaccagaacuagucaguau

SEQ ID NO: 4888 - RNA, 19 nt, Artificial Sequence
  Synthetic
gguaaaugguuugagauga

SEQ ID NO: 4889 - RNA, 19 nt, Artificial Sequence
  Synthetic
ggcacuaaaugcaugcaaa

SEQ ID NO: 4890 - RNA, 19 nt, Artificial Sequence
  Synthetic
acagaaacaccaagcguga

SEQ ID NO: 4891 - RNA, 19 nt, Artificial Sequence
  Synthetic
ggacaauccggcuguguga

SEQ ID NO: 4892 - RNA, 19 nt, Artificial Sequence
  Synthetic
auaagaggccagaaggcua

SEQ ID NO: 4893 - RNA, 19 nt, Artificial Sequence
  Synthetic
gcugugacaugaagugaau

SEQ ID NO: 4894 - RNA, 19 nt, Artificial Sequence
  Synthetic
ggagaaaguugcugaauaa

SEQ ID NO: 4895 - RNA, 19 nt, Artificial Sequence
  Synthetic
ggaagaagaggaagauaua

SEQ ID NO: 4896 - RNA, 19 nt, Artificial Sequence
  Synthetic
ggaaagaaagcauuagaua

SEQ ID NO: 4897 - RNA, 19 nt, Artificial Sequence
  Synthetic
ggauauugaagaacagaaa

SEQ ID NO: 4898 - RNA, 19 nt, Artificial Sequence
  Synthetic
ggaaaaugauacagcuaua

SEQ ID NO: 4899 - RNA, 19 nt, Artificial Sequence
  Synthetic
ugacuuagcccuaguaaua

SEQ ID NO: 4900 - RNA, 19 nt, Artificial Sequence
  Synthetic
gaaacaaguucuagaaagu

SEQ ID NO: 4901 - RNA, 19 nt, Artificial Sequence
  Synthetic
gaacaaacucuaagcagaa

SEQ ID NO: 4902 - RNA, 19 nt, Artificial Sequence
  Synthetic
ggugauaaagccaaagaua

SEQ ID NO: 4903 - RNA, 19 nt, Artificial Sequence
  Synthetic
agaaagggaaggaaaguua

SEQ ID NO: 4904 - RNA, 19 nt, Artificial Sequence
  Synthetic
agacuuugcucaagaacua

SEQ ID NO: 4905 - RNA, 19 nt, Artificial Sequence
  Synthetic
caggauuauugaaaggaua

SEQ ID NO: 4906 - RNA, 19 nt, Artificial Sequence
  Synthetic
uggagaaaguugcugaaua

SEQ ID NO: 4907 - RNA, 19 nt, Artificial Sequence
  Synthetic
cagaauaccuacaacuuaa

SEQ ID NO: 4908 - RNA, 19 nt, Artificial Sequence
  Synthetic
cauagaaacucacuggaua

SEQ ID NO: 4909 - RNA, 19 nt, Artificial Sequence
  Synthetic
ccaaacaacuccacaaauu

SEQ ID NO: 4910 - RNA, 19 nt, Artificial Sequence
  Synthetic
aggaaggcuuugaagauua

SEQ ID NO: 4911 - RNA, 19 nt, Artificial Sequence
  Synthetic
uaaugaggcucuagauuua

SEQ ID NO: 4912 - RNA, 19 nt, Artificial Sequence
  Synthetic
gaccaaaccucaaauauaa

SEQ ID NO: 4913 - RNA, 19 nt, Artificial Sequence
  Synthetic
agagaaauguggaaagcuu

SEQ ID NO: 4914 - RNA, 19 nt, Artificial Sequence
  Synthetic
uggaagaagaggaagauau

SEQ ID NO: 4915 - RNA, 19 nt, Artificial Sequence
  Synthetic
aguaaaggccucaacguua

SEQ ID NO: 4916 - RNA, 19 nt, Artificial Sequence
  Synthetic
aaucaguggaugaagaaua

SEQ ID NO: 4917 - RNA, 19 nt, Artificial Sequence
  Synthetic
cagaaagagggaagaauga

SEQ ID NO: 4918 - RNA, 19 nt, Artificial Sequence
  Synthetic
cuguaguaaucaugaacaa

SEQ ID NO: 4919 - RNA, 19 nt, Artificial Sequence
  Synthetic
gcagaaaacuugagucaga

SEQ ID NO: 4920 - RNA, 19 nt, Artificial Sequence
  Synthetic
ggaucuacauuucagaaua

SEQ ID NO: 4921 - RNA, 19 nt, Artificial Sequence
  Synthetic
agaaggauguugagaacga

SEQ ID NO: 4922 - RNA, 19 nt, Artificial Sequence
  Synthetic
gcauggauguggauggaga

SEQ ID NO: 4923 - RNA, 19 nt, Artificial Sequence
  Synthetic
agaaauacuuagaccauga

SEQ ID NO: 4924 - RNA, 19 nt, Artificial Sequence
  Synthetic
agggaagggaggagagaua

SEQ ID NO: 4925 - RNA, 19 nt, Artificial Sequence
  Synthetic
ccucauugcuguucagauu

SEQ ID NO: 4926 - RNA, 19 nt, Artificial Sequence
  Synthetic
augagaaggccgugaauga

SEQ ID NO: 4927 - RNA, 19 nt, Artificial Sequence
  Synthetic
ugccaaacuugaugaggaa

SEQ ID NO: 4928 - RNA, 19 nt, Artificial Sequence
  Synthetic
gguuugggaauaaggcaua

SEQ ID NO: 4929 - RNA, 19 nt, Artificial Sequence
  Synthetic
ccagacacuuuguggauga

SEQ ID NO: 4930 - RNA, 19 nt, Artificial Sequence
  Synthetic
ccgagugccuggagaaguu

SEQ ID NO: 4931 - RNA, 19 nt, Artificial Sequence
  Synthetic
augagaaccacaaggacua

SEQ ID NO: 4932 - RNA, 19 nt, Artificial Sequence
  Synthetic
gagaagugaccaaagugua

SEQ ID NO: 4933 - RNA, 19 nt, Artificial Sequence
  Synthetic
gaguguauccuguuuauua

SEQ ID NO: 4934 - RNA, 19 nt, Artificial Sequence
  Synthetic
acauguuccuggaguguau

SEQ ID NO: 4935 - RNA, 19 nt, Artificial Sequence
  Synthetic
ccaaagugaaccagggucu

SEQ ID NO: 4936 - RNA, 19 nt, Artificial Sequence
  Synthetic
guggaugaccaaauagcua

SEQ ID NO: 4937 - RNA, 19 nt, Artificial Sequence
  Synthetic
gaugaagacuggcccauuu

SEQ ID NO: 4938 - RNA, 19 nt, Artificial Sequence
  Synthetic
acgaaggugugaaggggaa

SEQ ID NO: 4939 - RNA, 19 nt, Artificial Sequence
  Synthetic
gcucacuugucuucaggaa

SEQ ID NO: 4940 - RNA, 19 nt, Artificial Sequence
  Synthetic
gagaaggccgugaaugaga

SEQ ID NO: 4941 - RNA, 19 nt, Artificial Sequence
  Synthetic
ccacacaguuccagacaug

SEQ ID NO: 4942 - RNA, 19 nt, Artificial Sequence
  Synthetic
uaaaggagucaguggggaa

SEQ ID NO: 4943 - RNA, 19 nt, Artificial Sequence
  Synthetic
aggcauacgcugacuacau

SEQ ID NO: 4944 - RNA, 19 nt, Artificial Sequence
  Synthetic
gcgcauugacuacggcaca

SEQ ID NO: 4945 - RNA, 19 nt, Artificial Sequence
  Synthetic
ggaagcguucucaggcaua

SEQ ID NO: 4946 - RNA, 19 nt, Artificial Sequence
  Synthetic
gauuaaagccucuguuuug

SEQ ID NO: 4947 - RNA, 19 nt, Artificial Sequence
  Synthetic
ccuugagguuaugcggaaa

SEQ ID NO: 4948 - RNA, 19 nt, Artificial Sequence
  Synthetic
ggucucauccgcauguaua

SEQ ID NO: 4949 - RNA, 19 nt, Artificial Sequence
  Synthetic
ccggguggaugaccaaaua

SEQ ID NO: 4950 - RNA, 19 nt, Artificial Sequence
  Synthetic
ccgugaaugagaaccacaa

SEQ ID NO: 4951 - RNA, 19 nt, Artificial Sequence
  Synthetic
ucauugcuguucagauuaa

SEQ ID NO: 4952 - RNA, 19 nt, Artificial Sequence
  Synthetic
ggaccagcccucucgguuu

SEQ ID NO: 4953 - RNA, 19 nt, Artificial Sequence
  Synthetic
ccucucgguuugggaauaa

SEQ ID NO: 4954 - RNA, 19 nt, Artificial Sequence
  Synthetic
gcaccgaauuuaugggaaa

SEQ ID NO: 4955 - RNA, 19 nt, Artificial Sequence
  Synthetic
gcugaaagacagagagaga

SEQ ID NO: 4956 - RNA, 19 nt, Artificial Sequence
  Synthetic
ugaaagacagagagagaaa

SEQ ID NO: 4957 - RNA, 19 nt, Artificial Sequence
  Synthetic
ugggaaauuucuuggauua

SEQ ID NO: 4958 - RNA, 19 nt, Artificial Sequence
  Synthetic
gcauuguacuucuggaaua

SEQ ID NO: 4959 - RNA, 19 nt, Artificial Sequence
  Synthetic
ggagaaagauacaacacua

SEQ ID NO: 4960 - RNA, 19 nt, Artificial Sequence
  Synthetic
caauacaagugccgaauaa

SEQ ID NO: 4961 - RNA, 19 nt, Artificial Sequence
  Synthetic
ggaauuggaacgugaagaa

SEQ ID NO: 4962 - RNA, 19 nt, Artificial Sequence
  Synthetic
cggagaaaguggacggcuu

SEQ ID NO: 4963 - RNA, 19 nt, Artificial Sequence
  Synthetic
ccuuaaaucuccaggcuuu

SEQ ID NO: 4964 - RNA, 19 nt, Artificial Sequence
  Synthetic
aaacaaaccucaucaguau

SEQ ID NO: 4965 - RNA, 19 nt, Artificial Sequence
  Synthetic
cgugaagaauuauggaaaa

SEQ ID NO: 4966 - RNA, 19 nt, Artificial Sequence
  Synthetic
gagaaagauacaacacuaa

SEQ ID NO: 4967 - RNA, 19 nt, Artificial Sequence
  Synthetic
ggaaaugaauggcaagcuu

SEQ ID NO: 4968 - RNA, 19 nt, Artificial Sequence
  Synthetic
acugaaagcagaacauaaa

SEQ ID NO: 4969 - RNA, 19 nt, Artificial Sequence
  Synthetic
auuggaacgugaagaauua

SEQ ID NO: 4970 - RNA, 19 nt, Artificial Sequence
  Synthetic
ugaaugaacugguugagua

SEQ ID NO: 4971 - RNA, 19 nt, Artificial Sequence
  Synthetic
cuaaagaaagcucuagaaa

SEQ ID NO: 4972 - RNA, 19 nt, Artificial Sequence
  Synthetic
acgugaagaauuauggaaa

SEQ ID NO: 4973 - RNA, 19 nt, Artificial Sequence
  Synthetic
cugaaaacccuaauggaaa

SEQ ID NO: 4974 - RNA, 19 nt, Artificial Sequence
  Synthetic
cuugaagagcaaagaaauu

SEQ ID NO: 4975 - RNA, 19 nt, Artificial Sequence
  Synthetic
cugaaaagguugacuauau

SEQ ID NO: 4976 - RNA, 19 nt, Artificial Sequence
  Synthetic
gaaugaacugguugaguau

SEQ ID NO: 4977 - RNA, 19 nt, Artificial Sequence
  Synthetic
ugguguaauuguugaauca

SEQ ID NO: 4978 - RNA, 19 nt, Artificial Sequence
  Synthetic
agaaggaauuggaacguga

SEQ ID NO: 4979 - RNA, 19 nt, Artificial Sequence
  Synthetic
cagcaauacaagugccgaa

SEQ ID NO: 4980 - RNA, 19 nt, Artificial Sequence
  Synthetic
aggagaaauugaagaaauc

SEQ ID NO: 4981 - RNA, 19 nt, Artificial Sequence
  Synthetic
cagaaagggcauuguacuu

SEQ ID NO: 4982 - RNA, 19 nt, Artificial Sequence
  Synthetic
ccauuguagcacugguaua

SEQ ID NO: 4983 - RNA, 19 nt, Artificial Sequence
  Synthetic
ugcugaacuucuugaaaua

SEQ ID NO: 4984 - RNA, 19 nt, Artificial Sequence
  Synthetic
cgaccgaagucuagguuuu

SEQ ID NO: 4985 - RNA, 19 nt, Artificial Sequence
  Synthetic
cugaagaggaugagcccaa

SEQ ID NO: 4986 - RNA, 19 nt, Artificial Sequence
  Synthetic
gcacaggcaagaagagauu

SEQ ID NO: 4987 - RNA, 19 nt, Artificial Sequence
  Synthetic
ccgacaagguggacggcuu

SEQ ID NO: 4988 - RNA, 19 nt, Artificial Sequence
  Synthetic
ccuccguggccaagagaua

SEQ ID NO: 4989 - RNA, 19 nt, Artificial Sequence
  Synthetic
ccgcaugaucucagugaau

SEQ ID NO: 4990 - RNA, 19 nt, Artificial Sequence
  Synthetic
ucacaguaaucauggucua

SEQ ID NO: 4991 - RNA, 19 nt, Artificial Sequence
  Synthetic
ccaagagauauguggauca

SEQ ID NO: 4992 - RNA, 19 nt, Artificial Sequence
  Synthetic
gcaugaucucagugaauau

SEQ ID NO: 4993 - RNA, 19 nt, Artificial Sequence
  Synthetic
agagauauguggaucaaaa

SEQ ID NO: 4994 - RNA, 19 nt, Artificial Sequence
  Synthetic
gggcaagcuugaccaggaa

SEQ ID NO: 4995 - RNA, 19 nt, Artificial Sequence
  Synthetic
gcucuguauuucuggaaca

SEQ ID NO: 4996 - RNA, 19 nt, Artificial Sequence
  Synthetic
ucuaugaauucgagcacuu

SEQ ID NO: 4997 - RNA, 19 nt, Artificial Sequence
  Synthetic
aagaagagauucacagugu

SEQ ID NO: 4998 - RNA, 19 nt, Artificial Sequence
  Synthetic
gaaccaaaccaucguauca

SEQ ID NO: 4999 - RNA, 19 nt, Artificial Sequence
  Synthetic
uggcugagcugcuggagau

SEQ ID NO: 5000 - RNA, 19 nt, Artificial Sequence
  Synthetic
gaguauauccuaagccuca

SEQ ID NO: 5001 - RNA, 19 nt, Artificial Sequence
  Synthetic
cccugaagacggagcacaa

SEQ ID NO: 5002 - RNA, 19 nt, Artificial Sequence
  Synthetic
gggagauggaagagauucu

SEQ ID NO: 5003 - RNA, 19 nt, Artificial Sequence
  Synthetic
acaaugugcucaagaccuu

SEQ ID NO: 5004 - RNA, 19 nt, Artificial Sequence
  Synthetic
caagagauauguggaucaa

SEQ ID NO: 5005 - RNA, 19 nt, Artificial Sequence
  Synthetic
cagugagaacccugaauuu

SEQ ID NO: 5006 - RNA, 19 nt, Artificial Sequence
  Synthetic
ccagagagaaacacaccua

SEQ ID NO: 5007 - RNA, 19 nt, Artificial Sequence
  Synthetic
ccucccaguuugugaagau

SEQ ID NO: 5008 - RNA, 19 nt, Artificial Sequence
  Synthetic
gguccauggucuauuuauu

SEQ ID NO: 5009 - RNA, 19 nt, Artificial Sequence
  Synthetic
gcagcugguauaugaguuu

SEQ ID NO: 5010 - RNA, 19 nt, Artificial Sequence
  Synthetic
cgucaggaguuauggcaag

SEQ ID NO: 5011 - RNA, 19 nt, Artificial Sequence
  Synthetic
ccaggagcgucaggaguua

SEQ ID NO: 5012 - RNA, 19 nt, Artificial Sequence
  Synthetic
cucaagaccuucauggaga

SEQ ID NO: 5013 - RNA, 19 nt, Artificial Sequence
  Synthetic
agacggagcacaagcaguu

SEQ ID NO: 5014 - RNA, 19 nt, Artificial Sequence
  Synthetic
ucacaaagucagagcgaua

SEQ ID NO: 5015 - RNA, 19 nt, Artificial Sequence
  Synthetic
ucacagaaucuaugggaaa

SEQ ID NO: 5016 - RNA, 19 nt, Artificial Sequence
  Synthetic
ggaaauauugggaaguaua

SEQ ID NO: 5017 - RNA, 19 nt, Artificial Sequence
  Synthetic
gcugauagauucucaaaua

SEQ ID NO: 5018 - RNA, 19 nt, Artificial Sequence
  Synthetic
uggaauagcacaaggagaa

SEQ ID NO: 5019 - RNA, 19 nt, Artificial Sequence
  Synthetic
caucagaauuugugaagau

SEQ ID NO: 5020 - RNA, 19 nt, Artificial Sequence
  Synthetic
gugcagaugcugagaaaga

SEQ ID NO: 5021 - RNA, 19 nt, Artificial Sequence
  Synthetic
ggagagagauuuucuuaaa

SEQ ID NO: 5022 - RNA, 19 nt, Artificial Sequence
  Synthetic
uagcagaguuacuggaaau

SEQ ID NO: 5023 - RNA, 19 nt, Artificial Sequence
  Synthetic
guacugagcuuuuguuuua

SEQ ID NO: 5024 - RNA, 19 nt, Artificial Sequence
  Synthetic
gacagaaauuggaguuuua

SEQ ID NO: 5025 - RNA, 19 nt, Artificial Sequence
  Synthetic
aagaagagcacaagauuuu

SEQ ID NO: 5026 - RNA, 19 nt, Artificial Sequence
  Synthetic
ggaagaagcauggguuaaa

SEQ ID NO: 5027 - RNA, 19 nt, Artificial Sequence
  Synthetic
ggaguaagccuguagaaga

SEQ ID NO: 5028 - RNA, 19 nt, Artificial Sequence
  Synthetic
ccuaauauagcgaagaaau

SEQ ID NO: 5029 - RNA, 19 nt, Artificial Sequence
  Synthetic
ucaaagacccauuggaaca

SEQ ID NO: 5030 - RNA, 19 nt, Artificial Sequence
  Synthetic
cauaggugguucugugaua

SEQ ID NO: 5031 - RNA, 19 nt, Artificial Sequence
  Synthetic
ggaagaugaaccaacguua

SEQ ID NO: 5032 - RNA, 19 nt, Artificial Sequence
  Synthetic
guaccaaacugauuucaaa

SEQ ID NO: 5033 - RNA, 19 nt, Artificial Sequence
  Synthetic
ccgcugaagucuagauguu

SEQ ID NO: 5034 - RNA, 19 nt, Artificial Sequence
  Synthetic
guguguaccuaaagccaua

SEQ ID NO: 5035 - RNA, 19 nt, Artificial Sequence
  Synthetic
cagaguuacuggaaauauu

SEQ ID NO: 5036 - RNA, 19 nt, Artificial Sequence
  Synthetic
gauuaggaguucaaacaau

SEQ ID NO: 5037 - RNA, 19 nt, Artificial Sequence
  Synthetic
caauacauggcuugauaua

SEQ ID NO: 5038 - RNA, 19 nt, Artificial Sequence
  Synthetic
uuaagugucuugaggcaua

SEQ ID NO: 5039 - RNA, 19 nt, Artificial Sequence
  Synthetic
agaaagauccgaagaagga

SEQ ID NO: 5040 - RNA, 19 nt, Artificial Sequence
  Synthetic
cagaauuugugaagaucau

SEQ ID NO: 5041 - RNA, 19 nt, Artificial Sequence
  Synthetic
cauugaaccaucagaauuu

SEQ ID NO: 5042 - RNA, 19 nt, Artificial Sequence
  Synthetic
cgagcugcuuuaagugaaa

SEQ ID NO: 5043 - RNA, 19 nt, Artificial Sequence
  Synthetic
ccuaaaguuucccuaguua

SEQ ID NO: 5044 - RNA, 19 nt, Artificial Sequence
  Synthetic
ggacaauaacugaugaaua

SEQ ID NO: 5045 - RNA, 19 nt, Artificial Sequence
  Synthetic
gggaacagcaggagauuau

SEQ ID NO: 5046 - RNA, 19 nt, Artificial Sequence
  Synthetic
agaaguacacacaggaaua

SEQ ID NO: 5047 - RNA, 19 nt, Artificial Sequence
  Synthetic
ugaaugagcuggaggagau

SEQ ID NO: 5048 - RNA, 19 nt, Artificial Sequence
  Synthetic
cugaaguuguuuauggaaa

SEQ ID NO: 5049 - RNA, 19 nt, Artificial Sequence
  Synthetic
agggaagagauguggcaaa

SEQ ID NO: 5050 - RNA, 19 nt, Artificial Sequence
  Synthetic
ucaacgagaugguggagua

SEQ ID NO: 5051 - RNA, 19 nt, Artificial Sequence
  Synthetic
caaacauagccaagaagua

SEQ ID NO: 5052 - RNA, 19 nt, Artificial Sequence
  Synthetic
gcuuauauccguaggcaga

SEQ ID NO: 5053 - RNA, 19 nt, Artificial Sequence
  Synthetic
guacagaacugaauaaagu

SEQ ID NO: 5054 - RNA, 19 nt, Artificial Sequence
  Synthetic
gggaagagauguggcaaaa

SEQ ID NO: 5055 - RNA, 19 nt, Artificial Sequence
  Synthetic
gggcaggacucaacgagau

SEQ ID NO: 5056 - RNA, 19 nt, Artificial Sequence
  Synthetic
ugguacaauuccuggagaa

SEQ ID NO: 5057 - RNA, 19 nt, Artificial Sequence
  Synthetic
aagaagagcacaagauguu

SEQ ID NO: 5058 - RNA, 19 nt, Artificial Sequence
  Synthetic
agaaguacaucgaccagaa

SEQ ID NO: 5059 - RNA, 19 nt, Artificial Sequence
  Synthetic
aggugauguucuugaauga

SEQ ID NO: 5060 - RNA, 19 nt, Artificial Sequence
  Synthetic
cccuuaaagaagagcacaa

SEQ ID NO: 5061 - RNA, 19 nt, Artificial Sequence
  Synthetic
aauacaaggcagagaagca

SEQ ID NO: 5062 - RNA, 19 nt, Artificial Sequence
  Synthetic
acgagaugguggaguacau

SEQ ID NO: 5063 - RNA, 19 nt, Artificial Sequence
  Synthetic
gggcugaguuugacccaga

SEQ ID NO: 5064 - RNA, 19 nt, Artificial Sequence
  Synthetic
acaucaagaaggagaaagu

SEQ ID NO: 5065 - RNA, 19 nt, Artificial Sequence
  Synthetic
aguuugacccagaggaaga

SEQ ID NO: 5066 - RNA, 19 nt, Artificial Sequence
  Synthetic
ccgaaugaaggaaagggaa

SEQ ID NO: 5067 - RNA, 19 nt, Artificial Sequence
  Synthetic
ccaaggaggugauguucuu

SEQ ID NO: 5068 - RNA, 19 nt, Artificial Sequence
  Synthetic
cagauaggguuguauuauu

SEQ ID NO: 5069 - RNA, 19 nt, Artificial Sequence
  Synthetic
gagaaguacacacaggaau

SEQ ID NO: 5070 - RNA, 19 nt, Artificial Sequence
  Synthetic
caacaagcgucccagcaau

SEQ ID NO: 5071 - RNA, 19 nt, Artificial Sequence
  Synthetic
ccuauuugacagugaggau

SEQ ID NO: 5072 - RNA, 19 nt, Artificial Sequence
  Synthetic
cgaaugaaggaaagggaag

SEQ ID NO: 5073 - RNA, 19 nt, Artificial Sequence
  Synthetic
gaaugaaggaaagggaaga

SEQ ID NO: 5074 - RNA, 19 nt, Artificial Sequence
  Synthetic
cggaaaggauucaggauaa

SEQ ID NO: 5075 - RNA, 19 nt, Artificial Sequence
  Synthetic
ggauguagccucugggaaa

SEQ ID NO: 5076 - RNA, 19 nt, Artificial Sequence
  Synthetic
ggauaaaguagacggauuu

SEQ ID NO: 5077 - RNA, 19 nt, Artificial Sequence
  Synthetic
cuggauaacuugacuguaa

SEQ ID NO: 5078 - RNA, 19 nt, Artificial Sequence
  Synthetic
ucuuagacgugauggaaua

SEQ ID NO: 5079 - RNA, 19 nt, Artificial Sequence
  Synthetic
uggauaaaguagacggauu

SEQ ID NO: 5080 - RNA, 19 nt, Artificial Sequence
  Synthetic
cgugaagaauuguggaaaa

SEQ ID NO: 5081 - RNA, 19 nt, Artificial Sequence
  Synthetic
ggaaaggauucaggauaaa

SEQ ID NO: 5082 - RNA, 19 nt, Artificial Sequence
  Synthetic
agacagaagaggucgcaaa

SEQ ID NO: 5083 - RNA, 19 nt, Artificial Sequence
  Synthetic
uuaaugaacugguggacua

SEQ ID NO: 5084 - RNA, 19 nt, Artificial Sequence
  Synthetic
gagaagaggugauaaacau

SEQ ID NO: 5085 - RNA, 19 nt, Artificial Sequence
  Synthetic
ccuaaaacauguagucaaa

SEQ ID NO: 5086 - RNA, 19 nt, Artificial Sequence
  Synthetic
ggaauggggucaugaauua

SEQ ID NO: 5087 - RNA, 19 nt, Artificial Sequence
  Synthetic
uggaggaucuggaguuaaa

SEQ ID NO: 5088 - RNA, 19 nt, Artificial Sequence
  Synthetic
ugaauuugauccagaagaa

SEQ ID NO: 5089 - RNA, 19 nt, Artificial Sequence
  Synthetic
cagaagaggucgcaaaguu

SEQ ID NO: 5090 - RNA, 19 nt, Artificial Sequence
  Synthetic
uggaagaaauauuggaugu

SEQ ID NO: 5091 - RNA, 19 nt, Artificial Sequence
  Synthetic
uagcugaacugcuggaaau

SEQ ID NO: 5092 - RNA, 19 nt, Artificial Sequence
  Synthetic
ugaaguaguuagaauggua

SEQ ID NO: 5093 - RNA, 19 nt, Artificial Sequence
  Synthetic
agaaugguaucuugcaaua

SEQ ID NO: 5094 - RNA, 19 nt, Artificial Sequence
  Synthetic
gaagaaaacucuaacguca

SEQ ID NO: 5095 - RNA, 19 nt, Artificial Sequence
  Synthetic
gggaagggaauaucggauu

SEQ ID NO: 5096 - RNA, 19 nt, Artificial Sequence
  Synthetic
guuuggaguuguugccuua

SEQ ID NO: 5097 - RNA, 19 nt, Artificial Sequence
  Synthetic
gcaaugaauuugauccaga

SEQ ID NO: 5098 - RNA, 19 nt, Artificial Sequence
  Synthetic
uaucaauggcuuugcuuua

SEQ ID NO: 5099 - RNA, 19 nt, Artificial Sequence
  Synthetic
gugaacaucuuuccaguaa

SEQ ID NO: 5100 - RNA, 19 nt, Artificial Sequence
  Synthetic
uugaaggcauuuauggaaa

SEQ ID NO: 5101 - RNA, 19 nt, Artificial Sequence
  Synthetic
agaaagaaaaggagcguga

SEQ ID NO: 5102 - RNA, 19 nt, Artificial Sequence
  Synthetic
gaacauuggaauccggcua

SEQ ID NO: 5103 - RNA, 19 nt, Artificial Sequence
  Synthetic
agaaaaggagcgugaagaa

SEQ ID NO: 5104 - RNA, 19 nt, Artificial Sequence
  Synthetic
ucuuauaacugcagagaaa

SEQ ID NO: 5105 - RNA, 19 nt, Artificial Sequence
  Synthetic
ggaaagaggugauaaggaa

SEQ ID NO: 5106 - RNA, 19 nt, Artificial Sequence
  Synthetic
gaacaagauccgagcaaua

SEQ ID NO: 5107 - RNA, 19 nt, Artificial Sequence
  Synthetic
uagcaaaccuugugaaauu

SEQ ID NO: 5108 - RNA, 19 nt, Artificial Sequence
  Synthetic
guucauacuucuacaguua

SEQ ID NO: 5109 - RNA, 19 nt, Artificial Sequence
  Synthetic
ggucagaagaagauggauu

SEQ ID NO: 5110 - RNA, 19 nt, Artificial Sequence
  Synthetic
ggagagagauaauaaacua

SEQ ID NO: 5111 - RNA, 19 nt, Artificial Sequence
  Synthetic
gcuuaaugccuuugaaauu

SEQ ID NO: 5112 - RNA, 19 nt, Artificial Sequence
  Synthetic
gaacaagacaccauauuaa

SEQ ID NO: 5113 - RNA, 19 nt, Artificial Sequence
  Synthetic
gagaaaauauccugacuaa

SEQ ID NO: 5114 - RNA, 19 nt, Artificial Sequence
  Synthetic
ugacugagaugcugguaaa

SEQ ID NO: 5115 - RNA, 19 nt, Artificial Sequence
  Synthetic
gauccgagcaauaggcaaa

SEQ ID NO: 5116 - RNA, 19 nt, Artificial Sequence
  Synthetic
ggugaaagcuguuccauuu

SEQ ID NO: 5117 - RNA, 19 nt, Artificial Sequence
  Synthetic
gagaagagagugagagugu

SEQ ID NO: 5118 - RNA, 19 nt, Artificial Sequence
  Synthetic
guauaucaguuacggguua

SEQ ID NO: 5119 - RNA, 19 nt, Artificial Sequence
  Synthetic
cuagagugaugaugugaaa

SEQ ID NO: 5120 - RNA, 19 nt, Artificial Sequence
  Synthetic
caacaaaaguccauucaua

SEQ ID NO: 5121 - RNA, 19 nt, Artificial Sequence
  Synthetic
gugaauucuuacagcacaa

SEQ ID NO: 5122 - RNA, 19 nt, Artificial Sequence
  Synthetic
aguguugcauugagaauaa

SEQ ID NO: 5123 - RNA, 19 nt, Artificial Sequence
  Synthetic
ggcaguaauagcagcaaua

SEQ ID NO: 5124 - RNA, 19 nt, Artificial Sequence
  Synthetic
ugaacuagggucagaagaa

SEQ ID NO: 5125 - RNA, 19 nt, Artificial Sequence
  Synthetic
gugaugaugugaaagaaau

SEQ ID NO: 5126 - RNA, 19 nt, Artificial Sequence
  Synthetic
ugaauuaggcagucuuaaa

SEQ ID NO: 5127 - RNA, 19 nt, Artificial Sequence
  Synthetic
gagaauaauaacagagggu

SEQ ID NO: 5128 - RNA, 19 nt, Artificial Sequence
  Synthetic
guaauucacuacagccuaa

SEQ ID NO: 5129 - RNA, 19 nt, Artificial Sequence
  Synthetic
uaacaaagcugcaguauug

SEQ ID NO: 5130 - RNA, 19 nt, Artificial Sequence
  Synthetic
caaagaaccaccugcauau

SEQ ID NO: 5131 - RNA, 19 nt, Artificial Sequence
  Synthetic
gggcuuagaccgaauuaau

SEQ ID NO: 5132 - RNA, 19 nt, Artificial Sequence
  Synthetic
gcaauuagcgauauagcau

SEQ ID NO: 5133 - RNA, 19 nt, Artificial Sequence
  Synthetic
cagagaagagagugagagu

SEQ ID NO: 5134 - RNA, 19 nt, Artificial Sequence
  Synthetic
ugacagaaauguugguaaa

SEQ ID NO: 5135 - RNA, 19 nt, Artificial Sequence
  Synthetic
gaaagaaggucgaguagau

SEQ ID NO: 5136 - RNA, 19 nt, Artificial Sequence
  Synthetic
gcuauagaauguacagaaa

SEQ ID NO: 5137 - RNA, 19 nt, Artificial Sequence
  Synthetic
ugguaaauguucugaguau

SEQ ID NO: 5138 - RNA, 19 nt, Artificial Sequence
  Synthetic
ucgaguagaugaagaaauu

SEQ ID NO: 5139 - RNA, 19 nt, Artificial Sequence
  Synthetic
acuaaugacugaaggugaa

SEQ ID NO: 5140 - RNA, 19 nt, Artificial Sequence
  Synthetic
ggauaggaucaaugagaga

SEQ ID NO: 5141 - RNA, 19 nt, Artificial Sequence
  Synthetic
gaugaauauucgacaguuu

SEQ ID NO: 5142 - RNA, 19 nt, Artificial Sequence
  Synthetic
ccuuuaagcaggaauguaa

SEQ ID NO: 5143 - RNA, 19 nt, Artificial Sequence
  Synthetic
ggugaaagaaggucgagua

SEQ ID NO: 5144 - RNA, 19 nt, Artificial Sequence
  Synthetic
uugaagaggcaaaggguuu

SEQ ID NO: 5145 - RNA, 19 nt, Artificial Sequence
  Synthetic
guaacauagucuugguauu

SEQ ID NO: 5146 - RNA, 19 nt, Artificial Sequence
  Synthetic
cuaugaagcuuguauggaa

SEQ ID NO: 5147 - RNA, 19 nt, Artificial Sequence
  Synthetic
gagaaugccaccucggaaa

SEQ ID NO: 5148 - RNA, 19 nt, Artificial Sequence
  Synthetic
caauacaguucgaggaugu

SEQ ID NO: 5149 - RNA, 19 nt, Artificial Sequence
  Synthetic
gcaauuggcaagauggcaa

SEQ ID NO: 5150 - RNA, 19 nt, Artificial Sequence
  Synthetic
cggaaagaaaucauaagaa

SEQ ID NO: 5151 - RNA, 19 nt, Artificial Sequence
  Synthetic
cggccaagcugacuguaaa

SEQ ID NO: 5152 - RNA, 19 nt, Artificial Sequence
  Synthetic
cauccuucggagagagaaa

SEQ ID NO: 5153 - RNA, 19 nt, Artificial Sequence
  Synthetic
gugcaggacuauucgagua

SEQ ID NO: 5154 - RNA, 19 nt, Artificial Sequence
  Synthetic
cagaaauguugguaaaugu

SEQ ID NO: 5155 - RNA, 19 nt, Artificial Sequence
  Synthetic
ccacauagaaucugcaguu

SEQ ID NO: 5156 - RNA, 19 nt, Artificial Sequence
  Synthetic
ggaaagagucuaugaagcu

SEQ ID NO: 5157 - RNA, 19 nt, Artificial Sequence
  Synthetic
uuacugaacugcuugguua

SEQ ID NO: 5158 - RNA, 19 nt, Artificial Sequence
  Synthetic
gauguuaguggaagcauaa

SEQ ID NO: 5159 - RNA, 19 nt, Artificial Sequence
  Synthetic
ggaugauauuaggagauua

SEQ ID NO: 5160 - RNA, 19 nt, Artificial Sequence
  Synthetic
uaguauagagugugucuua

SEQ ID NO: 5161 - RNA, 19 nt, Artificial Sequence
  Synthetic
gcagacaccuuacugaaua

SEQ ID NO: 5162 - RNA, 19 nt, Artificial Sequence
  Synthetic
gcugcagcccggaaagaaa

SEQ ID NO: 5163 - RNA, 19 nt, Artificial Sequence
  Synthetic
ccagagauuuaagaagaaa

SEQ ID NO: 5164 - RNA, 19 nt, Artificial Sequence
  Synthetic
ggaaguagccuuaaagaua

SEQ ID NO: 5165 - RNA, 19 nt, Artificial Sequence
  Synthetic
ucacagagaugcugguaaa

SEQ ID NO: 5166 - RNA, 19 nt, Artificial Sequence
  Synthetic
gcucuuauuucuacaguua

SEQ ID NO: 5167 - RNA, 19 nt, Artificial Sequence
  Synthetic
gaauaagaucagagccauu

SEQ ID NO: 5168 - RNA, 19 nt, Artificial Sequence
  Synthetic
caaggaaguauuugagaau

SEQ ID NO: 5169 - RNA, 19 nt, Artificial Sequence
  Synthetic
aggaauaagaucagagcca

SEQ ID NO: 5170 - RNA, 19 nt, Artificial Sequence
  Synthetic
ggaagaggaaguagccuua

SEQ ID NO: 5171 - RNA, 19 nt, Artificial Sequence
  Synthetic
aaggagaucaucaggaaua

SEQ ID NO: 5172 - RNA, 19 nt, Artificial Sequence
  Synthetic
gauccggaguuuugaagaa

SEQ ID NO: 5173 - RNA, 19 nt, Artificial Sequence
  Synthetic
gaaguagccuuaaagauaa

SEQ ID NO: 5174 - RNA, 19 nt, Artificial Sequence
  Synthetic
ggaccgaauuaaugagcga

SEQ ID NO: 5175 - RNA, 19 nt, Artificial Sequence
  Synthetic
gaucagagccauugggaag

SEQ ID NO: 5176 - RNA, 19 nt, Artificial Sequence
  Synthetic
guaaggagaucaucaggaa

SEQ ID NO: 5177 - RNA, 19 nt, Artificial Sequence
  Synthetic
auuugaaguuggaggauca

SEQ ID NO: 5178 - RNA, 19 nt, Artificial Sequence
  Synthetic
caauaaagcugcuguguug

SEQ ID NO: 5179 - RNA, 19 nt, Artificial Sequence
  Synthetic
ugugaagucuugugcuaua

SEQ ID NO: 5180 - RNA, 19 nt, Artificial Sequence
  Synthetic
uaucgaauguacaggaaga

SEQ ID NO: 5181 - RNA, 19 nt, Artificial Sequence
  Synthetic
guauagagugugugcugua

SEQ ID NO: 5182 - RNA, 19 nt, Artificial Sequence
  Synthetic
aggaaauuagacagguuua

SEQ ID NO: 5183 - RNA, 19 nt, Artificial Sequence
  Synthetic
cgagacagccacaguagaa

SEQ ID NO: 5184 - RNA, 19 nt, Artificial Sequence
  Synthetic
gaagaaagcccauucauga

SEQ ID NO: 5185 - RNA, 19 nt, Artificial Sequence
  Synthetic
ggaggaaugucaccugaaa

SEQ ID NO: 5186 - RNA, 19 nt, Artificial Sequence
  Synthetic
uggugauauucauggacaa

SEQ ID NO: 5187 - RNA, 19 nt, Artificial Sequence
  Synthetic
acaggaaugucgaaucaaa

SEQ ID NO: 5188 - RNA, 19 nt, Artificial Sequence
  Synthetic
aggaaugucaccugaaauu

SEQ ID NO: 5189 - RNA, 19 nt, Artificial Sequence
  Synthetic
aguauuugagaaugggaaa

SEQ ID NO: 5190 - RNA, 19 nt, Artificial Sequence
  Synthetic
aaacaggaaugucgaauca

SEQ ID NO: 5191 - RNA, 19 nt, Artificial Sequence
  Synthetic
ccacaguagaagcgguaga

SEQ ID NO: 5192 - RNA, 19 nt, Artificial Sequence
  Synthetic
ggcaagaaagugagagugu

SEQ ID NO: 5193 - RNA, 19 nt, Artificial Sequence
  Synthetic
gggccaaugaaaucuguaa

SEQ ID NO: 5194 - RNA, 19 nt, Artificial Sequence
  Synthetic
ggauggagauggaagaaua

SEQ ID NO: 5195 - RNA, 19 nt, Artificial Sequence
  Synthetic
gagauaaggagcagaaauu

SEQ ID NO: 5196 - RNA, 19 nt, Artificial Sequence
  Synthetic
ggauaaagauggcuauauu

SEQ ID NO: 5197 - RNA, 19 nt, Artificial Sequence
  Synthetic
ucugaaagauacacaguua

SEQ ID NO: 5198 - RNA, 19 nt, Artificial Sequence
  Synthetic
gaacuagccuuuugugaau

SEQ ID NO: 5199 - RNA, 19 nt, Artificial Sequence
  Synthetic
gcaaguuauccuuuggaaa

SEQ ID NO: 5200 - RNA, 19 nt, Artificial Sequence
  Synthetic
gagcaaaauuguauccaaa

SEQ ID NO: 5201 - RNA, 19 nt, Artificial Sequence
  Synthetic
agauaaggauggagaugga

SEQ ID NO: 5202 - RNA, 19 nt, Artificial Sequence
  Synthetic
agaugggaauggagaagua

SEQ ID NO: 5203 - RNA, 19 nt, Artificial Sequence
  Synthetic
ggagauaaggagcagaaau

SEQ ID NO: 5204 - RNA, 19 nt, Artificial Sequence
  Synthetic
aggcuaggaaagagauuua

SEQ ID NO: 5205 - RNA, 19 nt, Artificial Sequence
  Synthetic
gagcagaaauugagguuug

SEQ ID NO: 5206 - RNA, 19 nt, Artificial Sequence
  Synthetic
guaacaaaggagucuguaa

SEQ ID NO: 5207 - RNA, 19 nt, Artificial Sequence
  Synthetic
ggaugaaauuaaaaggcua

SEQ ID NO: 5208 - RNA, 19 nt, Artificial Sequence
  Synthetic
gugccaagcagaacauaaa

SEQ ID NO: 5209 - RNA, 19 nt, Artificial Sequence
  Synthetic
gauagaagacuguacaauu

SEQ ID NO: 5210 - RNA, 19 nt, Artificial Sequence
  Synthetic
gagaaaucuugcuaaucua

SEQ ID NO: 5211 - RNA, 19 nt, Artificial Sequence
  Synthetic
gauaaggagcagaaauuga

SEQ ID NO: 5212 - RNA, 19 nt, Artificial Sequence
  Synthetic
caaguuauccuuuggaaau

SEQ ID NO: 5213 - RNA, 19 nt, Artificial Sequence
  Synthetic
auacacaguuacagcaaau

SEQ ID NO: 5214 - RNA, 19 nt, Artificial Sequence
  Synthetic
ggaaagagauuuaagaagc

SEQ ID NO: 5215 - RNA, 19 nt, Artificial Sequence
  Synthetic
acagcgaguaauagauaua

SEQ ID NO: 5216 - RNA, 19 nt, Artificial Sequence
  Synthetic
ccaacuaaguguuauugaa

SEQ ID NO: 5217 - RNA, 19 nt, Artificial Sequence
  Synthetic
ucaguaacguuaagugcua

SEQ ID NO: 5218 - RNA, 19 nt, Artificial Sequence
  Synthetic
ugaagaugaugguggggaa

SEQ ID NO: 5219 - RNA, 19 nt, Artificial Sequence
  Synthetic
gaagaauauccuuugaaga

SEQ ID NO: 5220 - RNA, 19 nt, Artificial Sequence
  Synthetic
aagaauaccugaagugauc

SEQ ID NO: 5221 - RNA, 19 nt, Artificial Sequence
  Synthetic
gggaaaugaggcaaguuau

SEQ ID NO: 5222 - RNA, 19 nt, Artificial Sequence
  Synthetic
gaagaauaccugaagugau

SEQ ID NO: 5223 - RNA, 19 nt, Artificial Sequence
  Synthetic
guacagcgaguaauagaua

SEQ ID NO: 5224 - RNA, 19 nt, Artificial Sequence
  Synthetic
ccagagagaucuugguaga

SEQ ID NO: 5225 - RNA, 19 nt, Artificial Sequence
  Synthetic
ggagaggccuggagaccua

SEQ ID NO: 5226 - RNA, 19 nt, Artificial Sequence
  Synthetic
gcacugagaucuuugacua

SEQ ID NO: 5227 - RNA, 19 nt, Artificial Sequence
  Synthetic
ggacgagcaucuccagaaa

SEQ ID NO: 5228 - RNA, 19 nt, Artificial Sequence
  Synthetic
ucaaagagcuguucagagu

SEQ ID NO: 5229 - RNA, 19 nt, Artificial Sequence
  Synthetic
ccaugaaguuuccaauaau

SEQ ID NO: 5230 - RNA, 19 nt, Artificial Sequence
  Synthetic
ucuugguagaggagagcaa

SEQ ID NO: 5231 - RNA, 19 nt, Artificial Sequence
  Synthetic
gcgacgucccugagaccaa

SEQ ID NO: 5232 - RNA, 19 nt, Artificial Sequence
  Synthetic
acgagcaucuccagaaaga

SEQ ID NO: 5233 - RNA, 19 nt, Artificial Sequence
  Synthetic
gacaaucgaccgaaagcaa

SEQ ID NO: 5234 - RNA, 19 nt, Artificial Sequence
  Synthetic
cgcuaaggccagagagauc

SEQ ID NO: 5235 - RNA, 19 nt, Artificial Sequence
  Synthetic
cggcgacauccauggacaa

SEQ ID NO: 5236 - RNA, 19 nt, Artificial Sequence
  Synthetic
accaugaaguuuccaauaa

SEQ ID NO: 5237 - RNA, 19 nt, Artificial Sequence
  Synthetic
ucaaggagagcgaagucaa

SEQ ID NO: 5238 - RNA, 19 nt, Artificial Sequence
  Synthetic
cugcuaccgcugugggaau

SEQ ID NO: 5239 - RNA, 19 nt, Artificial Sequence
  Synthetic
gucaaggcccugugcgcua

SEQ ID NO: 5240 - RNA, 19 nt, Artificial Sequence
  Synthetic
acgaugagugccugcgcaa

SEQ ID NO: 5241 - RNA, 19 nt, Artificial Sequence
  Synthetic
caaucgaccgaaagcaaga

SEQ ID NO: 5242 - RNA, 19 nt, Artificial Sequence
  Synthetic
cgacauccauggacaauuc

SEQ ID NO: 5243 - RNA, 19 nt, Artificial Sequence
  Synthetic
ccaugagagucgccagauc

SEQ ID NO: 5244 - RNA, 19 nt, Artificial Sequence
  Synthetic
gaugagugccugcgcaagu

SEQ ID NO: 5245 - RNA, 19 nt, Artificial Sequence
  Synthetic
gcugcgagcucaucaagga

SEQ ID NO: 5246 - RNA, 19 nt, Artificial Sequence
  Synthetic
caugagagucgccagauca

SEQ ID NO: 5247 - RNA, 19 nt, Artificial Sequence
  Synthetic
gcgcuaaggccagagagau

SEQ ID NO: 5248 - RNA, 19 nt, Artificial Sequence
  Synthetic
ucuauagcgucgaaacguu

SEQ ID NO: 5249 - RNA, 19 nt, Artificial Sequence
  Synthetic
gaaccaugaaguuuccaau

SEQ ID NO: 5250 - RNA, 19 nt, Artificial Sequence
  Synthetic
aaccaugaaguuuccaaua

SEQ ID NO: 5251 - RNA, 19 nt, Artificial Sequence
  Synthetic
ucuauggcuucuacgauga

SEQ ID NO: 5252 - RNA, 19 nt, Artificial Sequence
  Synthetic
caaagagcuguucagagua

SEQ ID NO: 5253 - RNA, 19 nt, Artificial Sequence
  Synthetic
ggccagagagaucuuggua

SEQ ID NO: 5254 - RNA, 19 nt, Artificial Sequence
  Synthetic
agaaguacaucaaggguua

SEQ ID NO: 5255 - RNA, 19 nt, Artificial Sequence
  Synthetic
gguacaaggaccagaagaa

SEQ ID NO: 5256 - RNA, 19 nt, Artificial Sequence
  Synthetic
ugaaauaccaggagugcaa

SEQ ID NO: 5257 - RNA, 19 nt, Artificial Sequence
  Synthetic
gcaacaagaucgugaagca

SEQ ID NO: 5258 - RNA, 19 nt, Artificial Sequence
  Synthetic
ccauugagcuggacaagaa

SEQ ID NO: 5259 - RNA, 19 nt, Artificial Sequence
  Synthetic
aagucaaggccgagggcua

SEQ ID NO: 5260 - RNA, 19 nt, Artificial Sequence
  Synthetic
ucaaagagacagagaagau

SEQ ID NO: 5261 - RNA, 19 nt, Artificial Sequence
  Synthetic
gcaacauggcacugggcaa

SEQ ID NO: 5262 - RNA, 19 nt, Artificial Sequence
  Synthetic
gagcaugaccauugaggau

SEQ ID NO: 5263 - RNA, 19 nt, Artificial Sequence
  Synthetic
agaagaaacugcaccggaa

SEQ ID NO: 5264 - RNA, 19 nt, Artificial Sequence
  Synthetic
acuucaaagccaaggacua

SEQ ID NO: 5265 - RNA, 19 nt, Artificial Sequence
  Synthetic
cagaggagcucaagacuca

SEQ ID NO: 5266 - RNA, 19 nt, Artificial Sequence
  Synthetic
acagagaagauuacaguau

SEQ ID NO: 5267 - RNA, 19 nt, Artificial Sequence
  Synthetic
agaacaaccuggacuauau

SEQ ID NO: 5268 - RNA, 19 nt, Artificial Sequence
  Synthetic
agacgguggucaaggugaa

SEQ ID NO: 5269 - RNA, 19 nt, Artificial Sequence
  Synthetic
agggugaggugaaggccaa

SEQ ID NO: 5270 - RNA, 19 nt, Artificial Sequence
  Synthetic
gcaaagugacaaucaguuu

SEQ ID NO: 5271 - RNA, 19 nt, Artificial Sequence
  Synthetic
aaagagacagagaagauua

SEQ ID NO: 5272 - RNA, 19 nt, Artificial Sequence
  Synthetic
gaagaaacugcaccggaaa

SEQ ID NO: 5273 - RNA, 19 nt, Artificial Sequence
  Synthetic
gcaugaccauugaggauga

SEQ ID NO: 5274 - RNA, 19 nt, Artificial Sequence
  Synthetic
acaagaucgugaagcagaa

SEQ ID NO: 5275 - RNA, 19 nt, Artificial Sequence
  Synthetic
guacaaggaccagaagaaa

SEQ ID NO: 5276 - RNA, 19 nt, Artificial Sequence
  Synthetic
ucaacauauucgagcucaa

SEQ ID NO: 5277 - RNA, 19 nt, Artificial Sequence
  Synthetic
gggcgugagcugucaguuu

SEQ ID NO: 5278 - RNA, 19 nt, Artificial Sequence
  Synthetic
ccaucaaguucuacagcca

SEQ ID NO: 5279 - RNA, 19 nt, Artificial Sequence
  Synthetic
ggucagauccacagccaca

SEQ ID NO: 5280 - RNA, 19 nt, Artificial Sequence
  Synthetic
aagagaacaaccuggacua

SEQ ID NO: 5281 - RNA, 19 nt, Artificial Sequence
  Synthetic
gaggcaaccacgagacaga

SEQ ID NO: 5282 - RNA, 19 nt, Artificial Sequence
  Synthetic
acuacgagacgguggucaa

SEQ ID NO: 5283 - RNA, 19 nt, Artificial Sequence
  Synthetic
acgucaagcccauggccua

SEQ ID NO: 5284 - RNA, 19 nt, Artificial Sequence
  Synthetic
ggacaaguauguggaaaua

SEQ ID NO: 5285 - RNA, 19 nt, Artificial Sequence
  Synthetic
gagcaaaggucacaaauga

SEQ ID NO: 5286 - RNA, 19 nt, Artificial Sequence
  Synthetic
ucaugagaguagacagaua

SEQ ID NO: 5287 - RNA, 19 nt, Artificial Sequence
  Synthetic
gcauguagcucuugcuuau

SEQ ID NO: 5288 - RNA, 19 nt, Artificial Sequence
  Synthetic
uggacaaguauguggaaau

SEQ ID NO: 5289 - RNA, 19 nt, Artificial Sequence
  Synthetic
gcacgaaggcuauaaauuu

SEQ ID NO: 5290 - RNA, 19 nt, Artificial Sequence
  Synthetic
gcgaggaaaucaugagagu

SEQ ID NO: 5291 - RNA, 19 nt, Artificial Sequence
  Synthetic
uaacacaggucuauggauu

SEQ ID NO: 5292 - RNA, 19 nt, Artificial Sequence
  Synthetic
cugcuaucguuguggaaau

SEQ ID NO: 5293 - RNA, 19 nt, Artificial Sequence
  Synthetic
gcuaaugccuggagauacu

SEQ ID NO: 5294 - RNA, 19 nt, Artificial Sequence
  Synthetic
ccaaauauggaaaugcuaa

SEQ ID NO: 5295 - RNA, 19 nt, Artificial Sequence
  Synthetic
caagagaaccaaaguuauu

SEQ ID NO: 5296 - RNA, 19 nt, Artificial Sequence
  Synthetic
ugagaagacuugagaaaug

SEQ ID NO: 5297 - RNA, 19 nt, Artificial Sequence
  Synthetic
cuaaauggccugaucguau

SEQ ID NO: 5298 - RNA, 19 nt, Artificial Sequence
  Synthetic
gcaaguaccugccagagaa

SEQ ID NO: 5299 - RNA, 19 nt, Artificial Sequence
  Synthetic
gcucacaguagcagcuuua

SEQ ID NO: 5300 - RNA, 19 nt, Artificial Sequence
  Synthetic
guaacaguguguggagaua

SEQ ID NO: 5301 - RNA, 19 nt, Artificial Sequence
  Synthetic
cgcuagaccuggacaagua

SEQ ID NO: 5302 - RNA, 19 nt, Artificial Sequence
  Synthetic
cugcagagcacaucaacua

SEQ ID NO: 5303 - RNA, 19 nt, Artificial Sequence
  Synthetic
ggaaauauugcuucgauca

SEQ ID NO: 5304 - RNA, 19 nt, Artificial Sequence
  Synthetic
cacgaaggcuauaaauuua

SEQ ID NO: 5305 - RNA, 19 nt, Artificial Sequence
  Synthetic
gaggaaaucaugagaguag

SEQ ID NO: 5306 - RNA, 19 nt, Artificial Sequence
  Synthetic
gcagcaaaguuguuauuca

SEQ ID NO: 5307 - RNA, 19 nt, Artificial Sequence
  Synthetic
aaucaugagaguagacaga

SEQ ID NO: 5308 - RNA, 19 nt, Artificial Sequence
  Synthetic
augagaagcuggugacagu

SEQ ID NO: 5309 - RNA, 19 nt, Artificial Sequence
  Synthetic
caugagaguagacagauaa

SEQ ID NO: 5310 - RNA, 19 nt, Artificial Sequence
  Synthetic
uacaagagaaccaaaguua

SEQ ID NO: 5311 - RNA, 19 nt, Artificial Sequence
  Synthetic
aaauuggucuaaaggacaa

SEQ ID NO: 5312 - RNA, 19 nt, Artificial Sequence
  Synthetic
cuuuaauagaugagcagau

SEQ ID NO: 5313 - RNA, 19 nt, Artificial Sequence
  Synthetic
agauauccauggacaguuu

SEQ ID NO: 5314 - RNA, 19 nt, Artificial Sequence
  Synthetic
gcagaaaagugcagaagga

SEQ ID NO: 5315 - RNA, 19 nt, Artificial Sequence
  Synthetic
ccaagaugauagacaggau

SEQ ID NO: 5316 - RNA, 19 nt, Artificial Sequence
  Synthetic
ccguggaccuguacgagua

SEQ ID NO: 5317 - RNA, 19 nt, Artificial Sequence
  Synthetic
cagaaggaagggaagauca

SEQ ID NO: 5318 - RNA, 19 nt, Artificial Sequence
  Synthetic
aggaagggaagaucagcua

SEQ ID NO: 5319 - RNA, 19 nt, Artificial Sequence
  Synthetic
gcguuuguacggaaugaua

SEQ ID NO: 5320 - RNA, 19 nt, Artificial Sequence
  Synthetic
agaaguaccucgaccacga

SEQ ID NO: 5321 - RNA, 19 nt, Artificial Sequence
  Synthetic
cggccgaggaguacgacau

SEQ ID NO: 5322 - RNA, 19 nt, Artificial Sequence
  Synthetic
guucagacacggaaagaag

SEQ ID NO: 5323 - RNA, 19 nt, Artificial Sequence
  Synthetic
gugcagaaggaagggaaga

SEQ ID NO: 5324 - RNA, 19 nt, Artificial Sequence
  Synthetic
cggccaaguucguccaucu

SEQ ID NO: 5325 - RNA, 19 nt, Artificial Sequence
  Synthetic
gaucucugaggaagacaaa

SEQ ID NO: 5326 - RNA, 19 nt, Artificial Sequence
  Synthetic
gcuccuuccugcagaaugu

SEQ ID NO: 5327 - RNA, 19 nt, Artificial Sequence
  Synthetic
guacggaaugauaaacuuu

SEQ ID NO: 5328 - RNA, 19 nt, Artificial Sequence
  Synthetic
uggacgagcuguuccugua

SEQ ID NO: 5329 - RNA, 19 nt, Artificial Sequence
  Synthetic
gacgagaguaguucagaca

SEQ ID NO: 5330 - RNA, 19 nt, Artificial Sequence
  Synthetic
gagcagaaagagcagaucu

SEQ ID NO: 5331 - RNA, 19 nt, Artificial Sequence
  Synthetic
ggacugaagggaagaucac

SEQ ID NO: 5332 - RNA, 19 nt, Artificial Sequence
  Synthetic
gggccaccauggaugacau

SEQ ID NO: 5333 - RNA, 19 nt, Artificial Sequence
  Synthetic
ugaccgaauucuucucgua

SEQ ID NO: 5334 - RNA, 19 nt, Artificial Sequence
  Synthetic
cagccgguccugaagauga

SEQ ID NO: 5335 - RNA, 19 nt, Artificial Sequence
  Synthetic
ggagcuccuuccugcagaa

SEQ ID NO: 5336 - RNA, 19 nt, Artificial Sequence
  Synthetic
ucaaccagcugaccgaauu

SEQ ID NO: 5337 - RNA, 19 nt, Artificial Sequence
  Synthetic
gaucagcuaugccgacuuu

SEQ ID NO: 5338 - RNA, 19 nt, Artificial Sequence
  Synthetic
gccaaagcauuccgaccuu

SEQ ID NO: 5339 - RNA, 19 nt, Artificial Sequence
  Synthetic
cgaccagcaucgaguacug

SEQ ID NO: 5340 - RNA, 19 nt, Artificial Sequence
  Synthetic
ugaaggaggcguccgaguu

SEQ ID NO: 5341 - RNA, 19 nt, Artificial Sequence
  Synthetic
gcugcaagcuggccaacgu

SEQ ID NO: 5342 - RNA, 19 nt, Artificial Sequence
  Synthetic
ggaagggaagaucagcuau

SEQ ID NO: 5343 - RNA, 19 nt, Artificial Sequence
  Synthetic
uguacggaaugauaaacuu

SEQ ID NO: 5344 - RNA, 19 nt, Artificial Sequence
  Synthetic
gggaaggagaacaugguua

SEQ ID NO: 5345 - RNA, 19 nt, Artificial Sequence
  Synthetic
gaagcaacauugauagcaa

SEQ ID NO: 5346 - RNA, 19 nt, Artificial Sequence
  Synthetic
ggaauaaucugcgggcuaa

SEQ ID NO: 5347 - RNA, 19 nt, Artificial Sequence
  Synthetic
ggacuagagcccaacauua

SEQ ID NO: 5348 - RNA, 19 nt, Artificial Sequence
  Synthetic
gaaugaaagucgaaaguug

SEQ ID NO: 5349 - RNA, 19 nt, Artificial Sequence
  Synthetic
ccacccagauccauagaaa

SEQ ID NO: 5350 - RNA, 19 nt, Artificial Sequence
  Synthetic
ggaucugaccucacaguua

SEQ ID NO: 5351 - RNA, 19 nt, Artificial Sequence
  Synthetic
gacuagagcccaacauuaa

SEQ ID NO: 5352 - RNA, 19 nt, Artificial Sequence
  Synthetic
aagagaagcaacauugaua

SEQ ID NO: 5353 - RNA, 19 nt, Artificial Sequence
  Synthetic
ugacagaccucaaucaaga

SEQ ID NO: 5354 - RNA, 19 nt, Artificial Sequence
  Synthetic
uggaauugcucauacagaa

SEQ ID NO: 5355 - RNA, 19 nt, Artificial Sequence
  Synthetic
augguuaccuucagcaaua

SEQ ID NO: 5356 - RNA, 19 nt, Artificial Sequence
  Synthetic
uagcagcagugauggaauu

SEQ ID NO: 5357 - RNA, 19 nt, Artificial Sequence
  Synthetic
ggagaaagggcaauaucau

SEQ ID NO: 5358 - RNA, 19 nt, Artificial Sequence
  Synthetic
guuaaaagcugcugaaaag

SEQ ID NO: 5359 - RNA, 19 nt, Artificial Sequence
  Synthetic
ggauaacucaguauaagaa

SEQ ID NO: 5360 - RNA, 19 nt, Artificial Sequence
  Synthetic
ggcaacaagucaaggauaa

SEQ ID NO: 5361 - RNA, 19 nt, Artificial Sequence
  Synthetic
ugggagaacuggaagaaua

SEQ ID NO: 5362 - RNA, 19 nt, Artificial Sequence
  Synthetic
ccuaauaucugguggcuuu

SEQ ID NO: 5363 - RNA, 19 nt, Artificial Sequence
  Synthetic
gggagaacuggaagaauaa

SEQ ID NO: 5364 - RNA, 19 nt, Artificial Sequence
  Synthetic
ccaauguccuagagaguuu

SEQ ID NO: 5365 - RNA, 19 nt, Artificial Sequence
  Synthetic
uuguagagcugcugggaga

SEQ ID NO: 5366 - RNA, 19 nt, Artificial Sequence
  Synthetic
agaaggaaucgaugagcua

SEQ ID NO: 5367 - RNA, 19 nt, Artificial Sequence
  Synthetic
ggagauggugccacagaua

SEQ ID NO: 5368 - RNA, 19 nt, Artificial Sequence
  Synthetic
cggugaauaugcagguuuu

SEQ ID NO: 5369 - RNA, 19 nt, Artificial Sequence
  Synthetic
ggauaacgccaaaugguau

SEQ ID NO: 5370 - RNA, 19 nt, Artificial Sequence
  Synthetic
agucaaggauaacgccaaa

SEQ ID NO: 5371 - RNA, 19 nt, Artificial Sequence
  Synthetic
uggaaaaggaaaagugauu

SEQ ID NO: 5372 - RNA, 19 nt, Artificial Sequence
  Synthetic
cuacuuuaacggugaauau

SEQ ID NO: 5373 - RNA, 19 nt, Artificial Sequence
  Synthetic
gagaagaaggaaucgauga

SEQ ID NO: 5374 - RNA, 19 nt, Artificial Sequence
  Synthetic
gauugauacuguuugcuua

SEQ ID NO: 5375 - RNA, 19 nt, Artificial Sequence
  Synthetic
gggagcaggugcagagacu

SEQ ID NO: 5376 - RNA, 19 nt, Artificial Sequence
  Synthetic
ccuauuacaacuugcuaua

SEQ ID NO: 5377 - RNA, 19 nt, Artificial Sequence
  Synthetic
caaccaauguauuugccaa

SEQ ID NO: 5378 - RNA, 19 nt, Artificial Sequence
  Synthetic
caucagagaagaaggaauc

SEQ ID NO: 5379 - RNA, 19 nt, Artificial Sequence
  Synthetic
ccaauaggcugaaauucua

SEQ ID NO: 5380 - RNA, 19 nt, Artificial Sequence
  Synthetic
gagcaggugcagagacuca

SEQ ID NO: 5381 - RNA, 19 nt, Artificial Sequence
  Synthetic
gauuggagauggugccaca

SEQ ID NO: 5382 - RNA, 19 nt, Artificial Sequence
  Synthetic
ggcauaagggagcugguaa

SEQ ID NO: 5383 - RNA, 19 nt, Artificial Sequence
  Synthetic
ggcugaaauucuacuuuaa

SEQ ID NO: 5384 - RNA, 19 nt, Artificial Sequence
  Synthetic
aggcaacaagucaaggaua

SEQ ID NO: 5385 - RNA, 19 nt, Artificial Sequence
  Synthetic
gauaacgccaaaugguaua

SEQ ID NO: 5386 - RNA, 19 nt, Artificial Sequence
  Synthetic
agcugaaucugguggaaaa

SEQ ID NO: 5387 - RNA, 19 nt, Artificial Sequence
  Synthetic
gaggaaaugugaucaggca

SEQ ID NO: 5388 - RNA, 19 nt, Artificial Sequence
  Synthetic
ucugguggcuuuaggagua

SEQ ID NO: 5389 - RNA, 19 nt, Artificial Sequence
  Synthetic
uaggaguauuguagagcau

SEQ ID NO: 5390 - RNA, 19 nt, Artificial Sequence
  Synthetic
agcuaaaggugaagauaua

SEQ ID NO: 5391 - RNA, 19 nt, Artificial Sequence
  Synthetic
cagauaaugacaaggaaua

SEQ ID NO: 5392 - RNA, 19 nt, Artificial Sequence
  Synthetic
aguaaggaccagagacaaa

SEQ ID NO: 5393 - RNA, 19 nt, Artificial Sequence
  Synthetic
ggauaaaacaccaugaaaa

SEQ ID NO: 5394 - RNA, 19 nt, Artificial Sequence
  Synthetic
gaaugaaccuuuugaugaa

SEQ ID NO: 5395 - RNA, 19 nt, Artificial Sequence
  Synthetic
aaacagaacaagaugcuaa

SEQ ID NO: 5396 - RNA, 19 nt, Artificial Sequence
  Synthetic
agaaagacuugaaggcgua

SEQ ID NO: 5397 - RNA, 19 nt, Artificial Sequence
  Synthetic
cuguaaagcuggaaaggga

SEQ ID NO: 5398 - RNA, 19 nt, Artificial Sequence
  Synthetic
gaaguaaggaccagagaca

SEQ ID NO: 5399 - RNA, 19 nt, Artificial Sequence
  Synthetic
ccacaaaugaagggauaua

SEQ ID NO: 5400 - RNA, 19 nt, Artificial Sequence
  Synthetic
guauagagcgugcagauaa

SEQ ID NO: 5401 - RNA, 19 nt, Artificial Sequence
  Synthetic
gcauauuggugcuagaaaa

SEQ ID NO: 5402 - RNA, 19 nt, Artificial Sequence
  Synthetic
caacaaugacuuaaccaua

SEQ ID NO: 5403 - RNA, 19 nt, Artificial Sequence
  Synthetic
gaaugaaccuucugcaaca

SEQ ID NO: 5404 - RNA, 19 nt, Artificial Sequence
  Synthetic
gcagauaaugacaaggaau

SEQ ID NO: 5405 - RNA, 19 nt, Artificial Sequence
  Synthetic
caaauaaagacaaagccaa

SEQ ID NO: 5406 - RNA, 19 nt, Artificial Sequence
  Synthetic
cagcuaaaggugaagauau

SEQ ID NO: 5407 - RNA, 19 nt, Artificial Sequence
  Synthetic
gaucguuagcagaaacaaa

SEQ ID NO: 5408 - RNA, 19 nt, Artificial Sequence
  Synthetic
cgauagcauuugcaguaua

SEQ ID NO: 5409 - RNA, 19 nt, Artificial Sequence
  Synthetic
aagacaaagccaaccgaua

SEQ ID NO: 5410 - RNA, 19 nt, Artificial Sequence
  Synthetic
acgaacugguguaaugaua

SEQ ID NO: 5411 - RNA, 19 nt, Artificial Sequence
  Synthetic
gaucuugaccaauggcuaa

SEQ ID NO: 5412 - RNA, 19 nt, Artificial Sequence
  Synthetic
ggaacaauauugaugaugu

SEQ ID NO: 5413 - RNA, 19 nt, Artificial Sequence
  Synthetic
ugaaguggcuaaagagcuu

SEQ ID NO: 5414 - RNA, 19 nt, Artificial Sequence
  Synthetic
caacugaaguggcuaaaga

SEQ ID NO: 5415 - RNA, 19 nt, Artificial Sequence
  Synthetic
cagaaagacuugaaggcgu

SEQ ID NO: 5416 - RNA, 19 nt, Artificial Sequence
  Synthetic
gcaaauaaagacaaagcca

SEQ ID NO: 5417 - RNA, 19 nt, Artificial Sequence
  Synthetic
gcuaagugaagaugacaau

SEQ ID NO: 5418 - RNA, 19 nt, Artificial Sequence
  Synthetic
caguagaggagccgucaaa

SEQ ID NO: 5419 - RNA, 19 nt, Artificial Sequence
  Synthetic
aaguagaguucuuccacaa

SEQ ID NO: 5420 - RNA, 19 nt, Artificial Sequence
  Synthetic
gugcaaacauguagaauau

SEQ ID NO: 5421 - RNA, 19 nt, Artificial Sequence
  Synthetic
cuuaagaaguauggaguua

SEQ ID NO: 5422 - RNA, 19 nt, Artificial Sequence
  Synthetic
aauugaagguggaaugaaa

SEQ ID NO: 5423 - RNA, 19 nt, Artificial Sequence
  Synthetic
cugguuaagucuugugaaa

SEQ ID NO: 5424 - RNA, 19 nt, Artificial Sequence
  Synthetic
gcuaaugaauugagcacau

SEQ ID NO: 5425 - RNA, 19 nt, Artificial Sequence
  Synthetic
gguuaagucuugugaaaau

SEQ ID NO: 5426 - RNA, 19 nt, Artificial Sequence
  Synthetic
cagaaguguugaauugaaa

SEQ ID NO: 5427 - RNA, 19 nt, Artificial Sequence
  Synthetic
aaagggaaguggaaguaua

SEQ ID NO: 5428 - RNA, 19 nt, Artificial Sequence
  Synthetic
cauacaagaacaugagauu

SEQ ID NO: 5429 - RNA, 19 nt, Artificial Sequence
  Synthetic
auacgaagaugcaguacaa

SEQ ID NO: 5430 - RNA, 19 nt, Artificial Sequence
  Synthetic
ggagaaguaucguccuaaa

SEQ ID NO: 5431 - RNA, 19 nt, Artificial Sequence
  Synthetic
ccacaaucuucaaugagua

SEQ ID NO: 5432 - RNA, 19 nt, Artificial Sequence
  Synthetic
agguagagaugcuuuguua

SEQ ID NO: 5433 - RNA, 19 nt, Artificial Sequence
  Synthetic
caagugaacuguagaaacu

SEQ ID NO: 5434 - RNA, 19 nt, Artificial Sequence
  Synthetic
ccucacaccugaauugaaa

SEQ ID NO: 5435 - RNA, 19 nt, Artificial Sequence
  Synthetic
gcaagcaacuucuguauuu

SEQ ID NO: 5436 - RNA, 19 nt, Artificial Sequence
  Synthetic
ggacagccuugguuuguaa

SEQ ID NO: 5437 - RNA, 19 nt, Artificial Sequence
  Synthetic
aguaagaguaugugaagca

SEQ ID NO: 5438 - RNA, 19 nt, Artificial Sequence
  Synthetic
gaauugagcacaucuaaua

SEQ ID NO: 5439 - RNA, 19 nt, Artificial Sequence
  Synthetic
ggacucaaaguuuaaguaa

SEQ ID NO: 5440 - RNA, 19 nt, Artificial Sequence
  Synthetic
uguaaaggacucaaaguuu

SEQ ID NO: 5441 - RNA, 19 nt, Artificial Sequence
  Synthetic
ccacauucauaccaauaua

SEQ ID NO: 5442 - RNA, 19 nt, Artificial Sequence
  Synthetic
gagcugaaacaucuaaaua

SEQ ID NO: 5443 - RNA, 19 nt, Artificial Sequence
  Synthetic
gggaccggcuguaugauua

SEQ ID NO: 5444 - RNA, 19 nt, Artificial Sequence
  Synthetic
caaaauacccagcacaaua

SEQ ID NO: 5445 - RNA, 19 nt, Artificial Sequence
  Synthetic
uaacacagcucuauaccua

SEQ ID NO: 5446 - RNA, 19 nt, Artificial Sequence
  Synthetic
caguacaauucauaagaca

SEQ ID NO: 5447 - RNA, 19 nt, Artificial Sequence
  Synthetic
acucugaggugcaacuuaa

SEQ ID NO: 5448 - RNA, 19 nt, Artificial Sequence
  Synthetic
caacuuggcuaaagaaucu

SEQ ID NO: 5449 - RNA, 19 nt, Artificial Sequence
  Synthetic
acacuacucuuguggagaa

SEQ ID NO: 5450 - RNA, 19 nt, Artificial Sequence
  Synthetic
cgauuacgcuucagagaua

SEQ ID NO: 5451 - RNA, 19 nt, Artificial Sequence
  Synthetic
guaaacaaguggaaaguga

SEQ ID NO: 5452 - RNA, 19 nt, Artificial Sequence
  Synthetic
ugauaaagcuccaguugaa

SEQ ID NO: 5453 - RNA, 19 nt, Artificial Sequence
  Synthetic
gauaguagaugauugguua

SEQ ID NO: 5454 - RNA, 19 nt, Artificial Sequence
  Synthetic
aaauaggucucuaaggaaa

SEQ ID NO: 5455 - RNA, 19 nt, Artificial Sequence
  Synthetic
gaacaugcguuuucugaua

SEQ ID NO: 5456 - RNA, 19 nt, Artificial Sequence
  Synthetic
gagacuggccucagaaaua

SEQ ID NO: 5457 - RNA, 19 nt, Artificial Sequence
  Synthetic
agagaaugcugguagcuua

SEQ ID NO: 5458 - RNA, 19 nt, Artificial Sequence
  Synthetic
gaaaugugaaucuggaaua

SEQ ID NO: 5459 - RNA, 19 nt, Artificial Sequence
  Synthetic
ccaaguuguagauggaaua

SEQ ID NO: 5460 - RNA, 19 nt, Artificial Sequence
  Synthetic
agaaggauguauaaagcaa

SEQ ID NO: 5461 - RNA, 19 nt, Artificial Sequence
  Synthetic
caacaaguucacagaggaa

SEQ ID NO: 5462 - RNA, 19 nt, Artificial Sequence
  Synthetic
gagaaaugcuugugguaug

SEQ ID NO: 5463 - RNA, 19 nt, Artificial Sequence
  Synthetic
caaaggagcagcagcaaau

SEQ ID NO: 5464 - RNA, 19 nt, Artificial Sequence
  Synthetic
gaauauacguugcacauuu

SEQ ID NO: 5465 - RNA, 19 nt, Artificial Sequence
  Synthetic
gagaaaacacugauugaua

SEQ ID NO: 5466 - RNA, 19 nt, Artificial Sequence
  Synthetic
gaacauuaggccugugcaa

SEQ ID NO: 5467 - RNA, 19 nt, Artificial Sequence
  Synthetic
agaaggaaauguaaacgaa

SEQ ID NO: 5468 - RNA, 19 nt, Artificial Sequence
  Synthetic
cuuaagaaguauggaguga

SEQ ID NO: 5469 - RNA, 19 nt, Artificial Sequence
  Synthetic
aaugaugccuagugaguau

SEQ ID NO: 5470 - RNA, 19 nt, Artificial Sequence
  Synthetic
gaagagagacaucgugcaa

SEQ ID NO: 5471 - RNA, 19 nt, Artificial Sequence
  Synthetic
ggauucaaguggauucuaa

SEQ ID NO: 5472 - RNA, 19 nt, Artificial Sequence
  Synthetic
gagaaugcugguagcuuaa

SEQ ID NO: 5473 - RNA, 19 nt, Artificial Sequence
  Synthetic
gagagaagcuucauaagga

SEQ ID NO: 5474 - RNA, 19 nt, Artificial Sequence
  Synthetic
aguuguagauggaauagaa

SEQ ID NO: 5475 - RNA, 19 nt, Artificial Sequence
  Synthetic
caaugaagcuaagugguua

SEQ ID NO: 5476 - RNA, 19 nt, Artificial Sequence
  Synthetic
agagaagcuucauaaggaa

SEQ ID NO: 5477 - RNA, 19 nt, Artificial Sequence
  Synthetic
ccaaacagcugcuuuauuu

SEQ ID NO: 5478 - RNA, 19 nt, Artificial Sequence
  Synthetic
caacaaugaugccuaguga

SEQ ID NO: 5479 - RNA, 19 nt, Artificial Sequence
  Synthetic
ccaaugaagcuaagugguu

SEQ ID NO: 5480 - RNA, 19 nt, Artificial Sequence
  Synthetic
ucaccuaccuggagaaaua

SEQ ID NO: 5481 - RNA, 19 nt, Artificial Sequence
  Synthetic
ccggcaagguaguggaaga

SEQ ID NO: 5482 - RNA, 19 nt, Artificial Sequence
  Synthetic
ugaagugaccuaugacaaa

SEQ ID NO: 5483 - RNA, 19 nt, Artificial Sequence
  Synthetic
gugaagugaccuaugacaa

SEQ ID NO: 5484 - RNA, 19 nt, Artificial Sequence
  Synthetic
aaacagaggcugcgguuca

SEQ ID NO: 5485 - RNA, 19 nt, Artificial Sequence
  Synthetic
uugaggaccugaagaagua

SEQ ID NO: 5486 - RNA, 19 nt, Artificial Sequence
  Synthetic
gcuacaaacacaugcgcuu

SEQ ID NO: 5487 - RNA, 19 nt, Artificial Sequence
  Synthetic
ucauugaggaccugaagaa

SEQ ID NO: 5488 - RNA, 19 nt, Artificial Sequence
  Synthetic
gaggugagcuacaaacaca

SEQ ID NO: 5489 - RNA, 19 nt, Artificial Sequence
  Synthetic
ucucguuucucuuggacaa

SEQ ID NO: 5490 - RNA, 19 nt, Artificial Sequence
  Synthetic
cugaagaaguacggggcua

SEQ ID NO: 5491 - RNA, 19 nt, Artificial Sequence
  Synthetic
gcggagccaucaacagcaa

SEQ ID NO: 5492 - RNA, 19 nt, Artificial Sequence
  Synthetic
acaaaacgccgcuggagaa

SEQ ID NO: 5493 - RNA, 19 nt, Artificial Sequence
  Synthetic
uaaaacaggagccgugaaa

SEQ ID NO: 5494 - RNA, 19 nt, Artificial Sequence
  Synthetic
gagacgggaguuuggaguu

SEQ ID NO: 5495 - RNA, 19 nt, Artificial Sequence
  Synthetic
ggacuggccguuugacgau

SEQ ID NO: 5496 - RNA, 19 nt, Artificial Sequence
  Synthetic
acagcaagcagcucaccua

SEQ ID NO: 5497 - RNA, 19 nt, Artificial Sequence
  Synthetic
aagacccggugcugcguua

SEQ ID NO: 5498 - RNA, 19 nt, Artificial Sequence
  Synthetic
gcucaccuaccuggagaaa

SEQ ID NO: 5499 - RNA, 19 nt, Artificial Sequence
  Synthetic
aaacgccgcuggagaagga

SEQ ID NO: 5500 - RNA, 19 nt, Artificial Sequence
  Synthetic
agagcgggaugaaguacga

SEQ ID NO: 5501 - RNA, 19 nt, Artificial Sequence
  Synthetic
gaagugaccuaugacaaaa

SEQ ID NO: 5502 - RNA, 19 nt, Artificial Sequence
  Synthetic
ggacacccgaaggcaauaa

SEQ ID NO: 5503 - RNA, 19 nt, Artificial Sequence
  Synthetic
guuuggaguugcccgcuuu

SEQ ID NO: 5504 - RNA, 19 nt, Artificial Sequence
  Synthetic
gcacagggaucucguucuc

SEQ ID NO: 5505 - RNA, 19 nt, Artificial Sequence
  Synthetic
ccucuagccuguuuguugu

SEQ ID NO: 5506 - RNA, 19 nt, Artificial Sequence
  Synthetic
guucucggcaccuuaaauu

SEQ ID NO: 5507 - RNA, 19 nt, Artificial Sequence
  Synthetic
uuauguagcucaggaccuu

SEQ ID NO: 5508 - RNA, 19 nt, Artificial Sequence
  Synthetic
gugcgugugugugaaguga

SEQ ID NO: 5509 - RNA, 19 nt, Artificial Sequence
  Synthetic
agacgggaguuuggaguug

SEQ ID NO: 5510 - RNA, 19 nt, Artificial Sequence
  Synthetic
ggaagaaacaauugcauua

SEQ ID NO: 5511 - RNA, 19 nt, Artificial Sequence
  Synthetic
acucaaagauaauggguca

SEQ ID NO: 5512 - RNA, 19 nt, Artificial Sequence
  Synthetic
ggccaaagcccuagcaaau

SEQ ID NO: 5513 - RNA, 19 nt, Artificial Sequence
  Synthetic
gagaaugacugcugaccaa

SEQ ID NO: 5514 - RNA, 19 nt, Artificial Sequence
  Synthetic
ccacagaugaacuaagaaa

SEQ ID NO: 5515 - RNA, 19 nt, Artificial Sequence
  Synthetic
uggaaggacucaaagauaa

SEQ ID NO: 5516 - RNA, 19 nt, Artificial Sequence
  Synthetic
cgguagagcuugcaaguau

SEQ ID NO: 5517 - RNA, 19 nt, Artificial Sequence
  Synthetic
cgagauggagcuugggaaa

SEQ ID NO: 5518 - RNA, 19 nt, Artificial Sequence
  Synthetic
gcagcuggauaaagaguua

SEQ ID NO: 5519 - RNA, 19 nt, Artificial Sequence
  Synthetic
cuacagugacucagauuua

SEQ ID NO: 5520 - RNA, 19 nt, Artificial Sequence
  Synthetic
gauaauaguucuucccaau

SEQ ID NO: 5521 - RNA, 19 nt, Artificial Sequence
  Synthetic
ggaaauuaaucaggcuaua

SEQ ID NO: 5522 - RNA, 19 nt, Artificial Sequence
  Synthetic
cuaaagauccagauaguau

SEQ ID NO: 5523 - RNA, 19 nt, Artificial Sequence
  Synthetic
gugaauaaguugaagauug

SEQ ID NO: 5524 - RNA, 19 nt, Artificial Sequence
  Synthetic
cuaaagaaguuacugcuua

SEQ ID NO: 5525 - RNA, 19 nt, Artificial Sequence
  Synthetic
ggaaggacucaaagauaau

SEQ ID NO: 5526 - RNA, 19 nt, Artificial Sequence
  Synthetic
ccauuaaggcauucacuaa

SEQ ID NO: 5527 - RNA, 19 nt, Artificial Sequence
  Synthetic
gaagaaggcuauugcuaca

SEQ ID NO: 5528 - RNA, 19 nt, Artificial Sequence
  Synthetic
cggccaaagcccuagcaaa

SEQ ID NO: 5529 - RNA, 19 nt, Artificial Sequence
  Synthetic
cuggaaggacucaaagaua

SEQ ID NO: 5530 - RNA, 19 nt, Artificial Sequence
  Synthetic
uggugaaggugaugacauu

SEQ ID NO: 5531 - RNA, 19 nt, Artificial Sequence
  Synthetic
gaacuaagaaagucaccaa

SEQ ID NO: 5532 - RNA, 19 nt, Artificial Sequence
  Synthetic
ggugaugacauuugccuua

SEQ ID NO: 5533 - RNA, 19 nt, Artificial Sequence
  Synthetic
aggcauucacuaagguuaa

SEQ ID NO: 5534 - RNA, 19 nt, Artificial Sequence
  Synthetic
gggaagaaacaauugcauu

SEQ ID NO: 5535 - RNA, 19 nt, Artificial Sequence
  Synthetic
auaaagaguuacugaggca

SEQ ID NO: 5536 - RNA, 19 nt, Artificial Sequence
  Synthetic
gauaaugggucaccaauuu

SEQ ID NO: 5537 - RNA, 19 nt, Artificial Sequence
  Synthetic
ggauuaugguguagcgucu

SEQ ID NO: 5538 - RNA, 19 nt, Artificial Sequence
  Synthetic
gcuuaaagacggaauuuca

SEQ ID NO: 5539 - RNA, 19 nt, Artificial Sequence
  Synthetic
caagacucauuuagaacaa

SEQ ID NO: 5540 - RNA, 19 nt, Artificial Sequence
  Synthetic
aggaacacacagagguuua

SEQ ID NO: 5541 - RNA, 19 nt, Artificial Sequence
  Synthetic
auuaaaugggccagauaua

SEQ ID NO: 5542 - RNA, 19 nt, Artificial Sequence
  Synthetic
caauaagacuuccuaacaa

SEQ ID NO: 5543 - RNA, 19 nt, Artificial Sequence
  Synthetic
caagauuaccugaguccaa

SEQ ID NO: 5544 - RNA, 19 nt, Artificial Sequence
  Synthetic
gaaaggugcuucauggaga

SEQ ID NO: 5545 - RNA, 19 nt, Artificial Sequence
  Synthetic
gagaggugauuguagaaaa

SEQ ID NO: 5546 - RNA, 19 nt, Artificial Sequence
  Synthetic
uggugaacuucuuacaaua

SEQ ID NO: 5547 - RNA, 19 nt, Artificial Sequence
  Synthetic
ugagauaguucacuguuua

SEQ ID NO: 5548 - RNA, 19 nt, Artificial Sequence
  Synthetic
ugacagagaucacucgcua

SEQ ID NO: 5549 - RNA, 19 nt, Artificial Sequence
  Synthetic
gauuaaaugaucucugcaa

SEQ ID NO: 5550 - RNA, 19 nt, Artificial Sequence
  Synthetic
caagugaguucaagaaucu

SEQ ID NO: 5551 - RNA, 19 nt, Artificial Sequence
  Synthetic
ccacaacucuauuuucaua

SEQ ID NO: 5552 - RNA, 19 nt, Artificial Sequence
  Synthetic
acacacagagguuuauaua

SEQ ID NO: 5553 - RNA, 19 nt, Artificial Sequence
  Synthetic
uguuggaguugcuggugaa

SEQ ID NO: 5554 - RNA, 19 nt, Artificial Sequence
  Synthetic
cuuauauccuguuggaguu

SEQ ID NO: 5555 - RNA, 19 nt, Artificial Sequence
  Synthetic
gagauaguucacuguuuaa

SEQ ID NO: 5556 - RNA, 19 nt, Artificial Sequence
  Synthetic
guauaaaaccaauccagaa

SEQ ID NO: 5557 - RNA, 19 nt, Artificial Sequence
  Synthetic
ccaagugaguucaagaauc

SEQ ID NO: 5558 - RNA, 19 nt, Artificial Sequence
  Synthetic
gguccaagugaguucaaga

SEQ ID NO: 5559 - RNA, 19 nt, Artificial Sequence
  Synthetic
gugguugguucuagcuauu

SEQ ID NO: 5560 - RNA, 19 nt, Artificial Sequence
  Synthetic
aauccagaaugaagagagu

SEQ ID NO: 5561 - RNA, 19 nt, Artificial Sequence
  Synthetic
agacauuugccuugcuuga

SEQ ID NO: 5562 - RNA, 19 nt, Artificial Sequence
  Synthetic
auggagaggugauuguaga

SEQ ID NO: 5563 - RNA, 19 nt, Artificial Sequence
  Synthetic
ccagaauaaccaagauuac

SEQ ID NO: 5564 - RNA, 19 nt, Artificial Sequence
  Synthetic
uaaaugggccagauauaau

SEQ ID NO: 5565 - RNA, 19 nt, Artificial Sequence
  Synthetic
ggagaggugauuguagaaa

SEQ ID NO: 5566 - RNA, 19 nt, Artificial Sequence
  Synthetic
uauguuacgucaaagaaga

SEQ ID NO: 5567 - RNA, 19 nt, Artificial Sequence
  Synthetic
aaccauggcaucauauaua

SEQ ID NO: 5568 - RNA, 19 nt, Artificial Sequence
  Synthetic
guucacuguuuaauuggaa

SEQ ID NO: 5569 - RNA, 19 nt, Artificial Sequence
  Synthetic
aguauucagaagacacuua

SEQ ID NO: 5570 - RNA, 19 nt, Artificial Sequence
  Synthetic
ccaagaaacucgagagauc

SEQ ID NO: 5571 - RNA, 19 nt, Artificial Sequence
  Synthetic
gcacaauacuggccacaaa

SEQ ID NO: 5572 - RNA, 19 nt, Artificial Sequence
  Synthetic
uuacaauggccauggaaua

SEQ ID NO: 5573 - RNA, 19 nt, Artificial Sequence
  Synthetic
agaaagugcuguuagaaau

SEQ ID NO: 5574 - RNA, 19 nt, Artificial Sequence
  Synthetic
cugaagauaucaagucaua

SEQ ID NO: 5575 - RNA, 19 nt, Artificial Sequence
  Synthetic
cugaagaccuccacauuaa

SEQ ID NO: 5576 - RNA, 19 nt, Artificial Sequence
  Synthetic
uuucaaaguccgagaguca

SEQ ID NO: 5577 - RNA, 19 nt, Artificial Sequence
  Synthetic
ggauuaaacuacaucaaga

SEQ ID NO: 5578 - RNA, 19 nt, Artificial Sequence
  Synthetic
aagaaagugcuguuagaaa

SEQ ID NO: 5579 - RNA, 19 nt, Artificial Sequence
  Synthetic
caacagagugauggagaaa

SEQ ID NO: 5580 - RNA, 19 nt, Artificial Sequence
  Synthetic
ccgagaaggacgaggacca

SEQ ID NO: 5581 - RNA, 19 nt, Artificial Sequence
  Synthetic
ggacguugguucugcacua

SEQ ID NO: 5582 - RNA, 19 nt, Artificial Sequence
  Synthetic
cgaaauagguacagagacg

SEQ ID NO: 5583 - RNA, 19 nt, Artificial Sequence
  Synthetic
ggaagaagcccaaaggagu

SEQ ID NO: 5584 - RNA, 19 nt, Artificial Sequence
  Synthetic
gagaaagguucguuaaaau

SEQ ID NO: 5585 - RNA, 19 nt, Artificial Sequence
  Synthetic
ucaacagagugauggagaa

SEQ ID NO: 5586 - RNA, 19 nt, Artificial Sequence
  Synthetic
uuagugauauuguggguaa

SEQ ID NO: 5587 - RNA, 19 nt, Artificial Sequence
  Synthetic
aaauggacguacugguuua

SEQ ID NO: 5588 - RNA, 19 nt, Artificial Sequence
  Synthetic
aggaagagacccaggagga

SEQ ID NO: 5589 - RNA, 19 nt, Artificial Sequence
  Synthetic
caucaagggcuuuaucaaa

SEQ ID NO: 5590 - RNA, 19 nt, Artificial Sequence
  Synthetic
ucaagaaagugcuguuaga

SEQ ID NO: 5591 - RNA, 19 nt, Artificial Sequence
  Synthetic
gaagagacccaggaggaua

SEQ ID NO: 5592 - RNA, 19 nt, Artificial Sequence
  Synthetic
cuauaugccuuaagccaau

SEQ ID NO: 5593 - RNA, 19 nt, Artificial Sequence
  Synthetic
caaaggaguuacauucuua

SEQ ID NO: 5594 - RNA, 19 nt, Artificial Sequence
  Synthetic
gaagaagcccaaaggaguu

SEQ ID NO: 5595 - RNA, 19 nt, Artificial Sequence
  Synthetic
aagagacccaggaggauaa

SEQ ID NO: 5596 - RNA, 19 nt, Artificial Sequence
  Synthetic
ggagccacacaaugggaaa

SEQ ID NO: 5597 - RNA, 19 nt, Artificial Sequence
  Synthetic
aagcaugagucaagacacu

SEQ ID NO: 5598 - RNA, 19 nt, Artificial Sequence
  Synthetic
uggagaaagguucguuaaa

SEQ ID NO: 5599 - RNA, 19 nt, Artificial Sequence
  Synthetic
ggaaggaggacgguuguaa

SEQ ID NO: 5600 - RNA, 19 nt, Artificial Sequence
  Synthetic
ggaaagaagcagagaaauu

SEQ ID NO: 5601 - RNA, 19 nt, Artificial Sequence
  Synthetic
cgacguugguggaggagaa

SEQ ID NO: 5602 - RNA, 19 nt, Artificial Sequence
  Synthetic
ugggaaagaagcagagaaa

SEQ ID NO: 5603 - RNA, 19 nt, Artificial Sequence
  Synthetic
caccagaaguugugcauua

SEQ ID NO: 5604 - RNA, 19 nt, Artificial Sequence
  Synthetic
gggaagaauuugagacacu

SEQ ID NO: 5605 - RNA, 19 nt, Artificial Sequence
  Synthetic
ugacagaucuuguggaaca

SEQ ID NO: 5606 - RNA, 19 nt, Artificial Sequence
  Synthetic
ugacaucaucagagagaaa

SEQ ID NO: 5607 - RNA, 19 nt, Artificial Sequence
  Synthetic
gcaagaaaguuuaugugaa

SEQ ID NO: 5608 - RNA, 19 nt, Artificial Sequence
  Synthetic
gcucaugacuauacgcuaa

SEQ ID NO: 5609 - RNA, 19 nt, Artificial Sequence
  Synthetic
ggacaagggaauacggaga

SEQ ID NO: 5610 - RNA, 19 nt, Artificial Sequence
  Synthetic
gggcacgaauauacaaaua

SEQ ID NO: 5611 - RNA, 19 nt, Artificial Sequence
  Synthetic
ggauugaagaagagcagaa

SEQ ID NO: 5612 - RNA, 19 nt, Artificial Sequence
  Synthetic
gcgcacuggugaugacaaa

SEQ ID NO: 5613 - RNA, 19 nt, Artificial Sequence
  Synthetic
ggaaagaguaaauguguca

SEQ ID NO: 5614 - RNA, 19 nt, Artificial Sequence
  Synthetic
cgaaagaaguggagagagg

SEQ ID NO: 5615 - RNA, 19 nt, Artificial Sequence
  Synthetic
guuaggaacgucaaagaaa

SEQ ID NO: 5616 - RNA, 19 nt, Artificial Sequence
  Synthetic
cugaguugguccaguauua

SEQ ID NO: 5617 - RNA, 19 nt, Artificial Sequence
  Synthetic
uggagagaggaaagaguaa

SEQ ID NO: 5618 - RNA, 19 nt, Artificial Sequence
  Synthetic
cagauuacaucaaugcaaa

SEQ ID NO: 5619 - RNA, 19 nt, Artificial Sequence
  Synthetic
gagagaggaaagaguaaau

SEQ ID NO: 5620 - RNA, 19 nt, Artificial Sequence
  Synthetic
gagaugucauugagcuuaa

SEQ ID NO: 5621 - RNA, 19 nt, Artificial Sequence
  Synthetic
gagagaagacagugcuaga

SEQ ID NO: 5622 - RNA, 19 nt, Artificial Sequence
  Synthetic
gaggaaagggcacgaauau

SEQ ID NO: 5623 - RNA, 19 nt, Artificial Sequence
  Synthetic
ggagaugguuucacccaaa

SEQ ID NO: 5624 - RNA, 19 nt, Artificial Sequence
  Synthetic
aaacaaggcuuuugggaag

SEQ ID NO: 5625 - RNA, 19 nt, Artificial Sequence
  Synthetic
guauaaaugcugcugaaau

SEQ ID NO: 5626 - RNA, 19 nt, Artificial Sequence
  Synthetic
uggaggaggugcaccauaa

SEQ ID NO: 5627 - RNA, 19 nt, Artificial Sequence
  Synthetic
agaaauagauguggacuuu

SEQ ID NO: 5628 - RNA, 19 nt, Artificial Sequence
  Synthetic
gaccacagauaaagucaaa

SEQ ID NO: 5629 - RNA, 19 nt, Artificial Sequence
  Synthetic
gaaagaagcagagaaauua

SEQ ID NO: 5630 - RNA, 19 nt, Artificial Sequence
  Synthetic
ggaauuaaguucagaucua

SEQ ID NO: 5631 - RNA, 19 nt, Artificial Sequence
  Synthetic
cagcagaccucaacagaaa

SEQ ID NO: 5632 - RNA, 19 nt, Artificial Sequence
  Synthetic
ggaaaauaccagaggaauu

SEQ ID NO: 5633 - RNA, 19 nt, Artificial Sequence
  Synthetic
ugacaagagagaacaaaua

SEQ ID NO: 5634 - RNA, 19 nt, Artificial Sequence
  Synthetic
gaggaaauaucaagaacau

SEQ ID NO: 5635 - RNA, 19 nt, Artificial Sequence
  Synthetic
ggaaauaucaagaacauga

SEQ ID NO: 5636 - RNA, 19 nt, Artificial Sequence
  Synthetic
ggacaaugauagauaccau

SEQ ID NO: 5637 - RNA, 19 nt, Artificial Sequence
  Synthetic
ggaugauaugggaguauaa

SEQ ID NO: 5638 - RNA, 19 nt, Artificial Sequence
  Synthetic
ugauaagcuuaaugaggaa

SEQ ID NO: 5639 - RNA, 19 nt, Artificial Sequence
  Synthetic
caagaaaugagaacacaaa

SEQ ID NO: 5640 - RNA, 19 nt, Artificial Sequence
  Synthetic
ccacugaaagccagauuua

SEQ ID NO: 5641 - RNA, 19 nt, Artificial Sequence
  Synthetic
gggaacacacuuuugaaua

SEQ ID NO: 5642 - RNA, 19 nt, Artificial Sequence
  Synthetic
gcauaugguuucaucagaa

SEQ ID NO: 5643 - RNA, 19 nt, Artificial Sequence
  Synthetic
guacagggcaaguagguau

SEQ ID NO: 5644 - RNA, 19 nt, Artificial Sequence
  Synthetic
ucucuaagccacaggaauu

SEQ ID NO: 5645 - RNA, 19 nt, Artificial Sequence
  Synthetic
acuaaaagcugggaaaaua

SEQ ID NO: 5646 - RNA, 19 nt, Artificial Sequence
  Synthetic
caacagaagccacagauau

SEQ ID NO: 5647 - RNA, 19 nt, Artificial Sequence
  Synthetic
uggaagaacaggugccauu

SEQ ID NO: 5648 - RNA, 19 nt, Artificial Sequence
  Synthetic
acugaaagccagauuuaua

SEQ ID NO: 5649 - RNA, 19 nt, Artificial Sequence
  Synthetic
gugcugugacccagaauaa

SEQ ID NO: 5650 - RNA, 19 nt, Artificial Sequence
  Synthetic
acauaauauagcaggaaca

SEQ ID NO: 5651 - RNA, 19 nt, Artificial Sequence
  Synthetic
cagacuauaucaaugcaaa

SEQ ID NO: 5652 - RNA, 19 nt, Artificial Sequence
  Synthetic
uaauauagcaggaacaaca

SEQ ID NO: 5653 - RNA, 19 nt, Artificial Sequence
  Synthetic
ugauuuaucugaaggcaau

SEQ ID NO: 5654 - RNA, 19 nt, Artificial Sequence
  Synthetic
caacaauugaacagauaga

SEQ ID NO: 5655 - RNA, 19 nt, Artificial Sequence
  Synthetic
gcugauggagugaaugaaa

SEQ ID NO: 5656 - RNA, 19 nt, Artificial Sequence
  Synthetic
ggaugcuaaagaagaaaua

SEQ ID NO: 5657 - RNA, 19 nt, Artificial Sequence
  Synthetic
aaacaaaggagcaauauga

SEQ ID NO: 5658 - RNA, 19 nt, Artificial Sequence
  Synthetic
agucagagauucaguaagu

SEQ ID NO: 5659 - RNA, 19 nt, Artificial Sequence
  Synthetic
cagacucagaugaaagaaa

SEQ ID NO: 5660 - RNA, 19 nt, Artificial Sequence
  Synthetic
guggaaacacugagaaaua

SEQ ID NO: 5661 - RNA, 19 nt, Artificial Sequence
  Synthetic
ccaugaagauucugauaaa

SEQ ID NO: 5662 - RNA, 19 nt, Artificial Sequence
  Synthetic
gaaagaagaaccaaagaaa

SEQ ID NO: 5663 - RNA, 19 nt, Artificial Sequence
  Synthetic
ggaaagaagaguucguuua

SEQ ID NO: 5664 - RNA, 19 nt, Artificial Sequence
  Synthetic
uggacgaguucuagaauua

SEQ ID NO: 5665 - RNA, 19 nt, Artificial Sequence
  Synthetic
acaaagaggaguuggguuu

SEQ ID NO: 5666 - RNA, 19 nt, Artificial Sequence
  Synthetic
ggaaguuaacagagcauua

SEQ ID NO: 5667 - RNA, 19 nt, Artificial Sequence
  Synthetic
ggaccgaauccgagagaga

SEQ ID NO: 5668 - RNA, 19 nt, Artificial Sequence
  Synthetic
agaaauugcccuagaaaca

SEQ ID NO: 5669 - RNA, 19 nt, Artificial Sequence
  Synthetic
gggaacugcuccagaagua

SEQ ID NO: 5670 - RNA, 19 nt, Artificial Sequence
  Synthetic
agaaggaagaacagauaua

SEQ ID NO: 5671 - RNA, 19 nt, Artificial Sequence
  Synthetic
caugaugacucaagaagua

SEQ ID NO: 5672 - RNA, 19 nt, Artificial Sequence
  Synthetic
gagaagaagugaagccuca

SEQ ID NO: 5673 - RNA, 19 nt, Artificial Sequence
  Synthetic
uaagauaccaguugggaaa

SEQ ID NO: 5674 - RNA, 19 nt, Artificial Sequence
  Synthetic
aagggaagaaugaggauaa

SEQ ID NO: 5675 - RNA, 19 nt, Artificial Sequence
  Synthetic
uaacaaagggcuuaguaaa

SEQ ID NO: 5676 - RNA, 19 nt, Artificial Sequence
  Synthetic
acgugaaacacuugguaaa

SEQ ID NO: 5677 - RNA, 19 nt, Artificial Sequence
  Synthetic
ggaaagaagaaccaaagaa

SEQ ID NO: 5678 - RNA, 19 nt, Artificial Sequence
  Synthetic
ggaaauugauacugcgcuu

SEQ ID NO: 5679 - RNA, 19 nt, Artificial Sequence
  Synthetic
ugaaagucuccaagaauua

SEQ ID NO: 5680 - RNA, 19 nt, Artificial Sequence
  Synthetic
gagaauuauuucaaggaca

SEQ ID NO: 5681 - RNA, 19 nt, Artificial Sequence
  Synthetic
aagcagaagaagagcaaaa

SEQ ID NO: 5682 - RNA, 19 nt, Artificial Sequence
  Synthetic
caaagaaaacugaggaauu

SEQ ID NO: 5683 - RNA, 19 nt, Artificial Sequence
  Synthetic
caucaaagauacacaagau

SEQ ID NO: 5684 - RNA, 19 nt, Artificial Sequence
  Synthetic
ccaaagacugacagaauau

SEQ ID NO: 5685 - RNA, 19 nt, Artificial Sequence
  Synthetic
cuaaggagcuggagaaucu

SEQ ID NO: 5686 - RNA, 19 nt, Artificial Sequence
  Synthetic
gccaaagacugacagaaua

SEQ ID NO: 5687 - RNA, 19 nt, Artificial Sequence
  Synthetic
ucaagaaguagaaggagaa

SEQ ID NO: 5688 - RNA, 19 nt, Artificial Sequence
  Synthetic
agggauccguuaagagaaa

SEQ ID NO: 5689 - RNA, 19 nt, Artificial Sequence
  Synthetic
ccaaaggcaaucagagaau

SEQ ID NO: 5690 - RNA, 19 nt, Artificial Sequence
  Synthetic
gaacagaauuggaagacaa

SEQ ID NO: 5691 - RNA, 19 nt, Artificial Sequence
  Synthetic
ggagaaaccucugaagaaa

SEQ ID NO: 5692 - RNA, 19 nt, Artificial Sequence
  Synthetic
gcuacaacguccugagcaa

SEQ ID NO: 5693 - RNA, 19 nt, Artificial Sequence
  Synthetic
ccacaagauaucaguauua

SEQ ID NO: 5694 - RNA, 19 nt, Artificial Sequence
  Synthetic
gguggaaagcacagggcaa

SEQ ID NO: 5695 - RNA, 19 nt, Artificial Sequence
  Synthetic
cagaggaacccaaagaaua

SEQ ID NO: 5696 - RNA, 19 nt, Artificial Sequence
  Synthetic
ugagcaaauuccaaagaaa

SEQ ID NO: 5697 - RNA, 19 nt, Artificial Sequence
  Synthetic
ucacagaauaugagcaaau

SEQ ID NO: 5698 - RNA, 19 nt, Artificial Sequence
  Synthetic
agaggaacccaaagaauaa

SEQ ID NO: 5699 - RNA, 19 nt, Artificial Sequence
  Synthetic
gguccaaggaagaguguga

SEQ ID NO: 5700 - RNA, 19 nt, Artificial Sequence
  Synthetic
gaagaaacaucuggacaaa

SEQ ID NO: 5701 - RNA, 19 nt, Artificial Sequence
  Synthetic
ugaagaaacaucuggacaa

SEQ ID NO: 5702 - RNA, 19 nt, Artificial Sequence
  Synthetic
agaaacaucuggacaaauu

SEQ ID NO: 5703 - RNA, 19 nt, Artificial Sequence
  Synthetic
agaaacuagaagagggaau

SEQ ID NO: 5704 - RNA, 19 nt, Artificial Sequence
  Synthetic
agacagcauuauagagaga

SEQ ID NO: 5705 - RNA, 19 nt, Artificial Sequence
  Synthetic
caaggaagagugugagcaa

SEQ ID NO: 5706 - RNA, 19 nt, Artificial Sequence
  Synthetic
gaagacaagcgguaauaua

SEQ ID NO: 5707 - RNA, 19 nt, Artificial Sequence
  Synthetic
ggauggauuuggacaggaa

SEQ ID NO: 5708 - RNA, 19 nt, Artificial Sequence
  Synthetic
uggagaaaccucugaagaa

SEQ ID NO: 5709 - RNA, 19 nt, Artificial Sequence
  Synthetic
gagcaaauuccaaagaaaa

SEQ ID NO: 5710 - RNA, 19 nt, Artificial Sequence
  Synthetic
gaucaggaaucuagagaag

SEQ ID NO: 5711 - RNA, 19 nt, Artificial Sequence
  Synthetic
ggaagagaaucgaguugau

SEQ ID NO: 5712 - RNA, 19 nt, Artificial Sequence
  Synthetic
ugucauggcuucagcaaga

SEQ ID NO: 5713 - RNA, 19 nt, Artificial Sequence
  Synthetic
guucacagaauaugagcaa

SEQ ID NO: 5714 - RNA, 19 nt, Artificial Sequence
  Synthetic
gcaagaggccacaagauau

SEQ ID NO: 5715 - RNA, 19 nt, Artificial Sequence
  Synthetic
ggugagcacuacucggaaa

SEQ ID NO: 5716 - RNA, 19 nt, Artificial Sequence
  Synthetic
gaagaaacuagaagaggga

SEQ ID NO: 5717 - RNA, 19 nt, Artificial Sequence
  Synthetic
cccacaugcuuaagaacua

SEQ ID NO: 5718 - RNA, 19 nt, Artificial Sequence
  Synthetic
ggaaugguguucacagaau

SEQ ID NO: 5719 - RNA, 19 nt, Artificial Sequence
  Synthetic
ccucagagaguaugugcua

SEQ ID NO: 5720 - RNA, 19 nt, Artificial Sequence
  Synthetic
agccaaagcuucagagaua

SEQ ID NO: 5721 - RNA, 19 nt, Artificial Sequence
  Synthetic
ucagauuacuagacagaua

SEQ ID NO: 5722 - RNA, 19 nt, Artificial Sequence
  Synthetic
ccagagaacgugaggaaga

SEQ ID NO: 5723 - RNA, 19 nt, Artificial Sequence
  Synthetic
ggccagagaacgugaggaa

SEQ ID NO: 5724 - RNA, 19 nt, Artificial Sequence
  Synthetic
acaaagacgugcugccuua

SEQ ID NO: 5725 - RNA, 19 nt, Artificial Sequence
  Synthetic
ccagauaggcagacagaca

SEQ ID NO: 5726 - RNA, 19 nt, Artificial Sequence
  Synthetic
gggcaugaccccugaguua

SEQ ID NO: 5727 - RNA, 19 nt, Artificial Sequence
  Synthetic
ccaccaaccuggacagaca

SEQ ID NO: 5728 - RNA, 19 nt, Artificial Sequence
  Synthetic
caagaaagaagaucaggaa

SEQ ID NO: 5729 - RNA, 19 nt, Artificial Sequence
  Synthetic
gcgacuacauuaauggcaa

SEQ ID NO: 5730 - RNA, 19 nt, Artificial Sequence
  Synthetic
ggaaaaggugugagcggua

SEQ ID NO: 5731 - RNA, 19 nt, Artificial Sequence
  Synthetic
gggccuggaucaaaguuaa

SEQ ID NO: 5732 - RNA, 19 nt, Artificial Sequence
  Synthetic
ccagaacaucaaagagaau

SEQ ID NO: 5733 - RNA, 19 nt, Artificial Sequence
  Synthetic
ggaagaaccgcuacaaaga

SEQ ID NO: 5734 - RNA, 19 nt, Artificial Sequence
  Synthetic
ggacacagcgacuacauua

SEQ ID NO: 5735 - RNA, 19 nt, Artificial Sequence
  Synthetic
gcacagagcagauucaaga

SEQ ID NO: 5736 - RNA, 19 nt, Artificial Sequence
  Synthetic
guacacaucuccagcuauu

SEQ ID NO: 5737 - RNA, 19 nt, Artificial Sequence
  Synthetic
agagcagauucaagaaaga

SEQ ID NO: 5738 - RNA, 19 nt, Artificial Sequence
  Synthetic
gauagagaaugggcggaaa

SEQ ID NO: 5739 - RNA, 19 nt, Artificial Sequence
  Synthetic
ggacagacagccaaagcuu

SEQ ID NO: 5740 - RNA, 19 nt, Artificial Sequence
  Synthetic
cagagaacgugaggaagaa

SEQ ID NO: 5741 - RNA, 19 nt, Artificial Sequence
  Synthetic
gaggaagaaccgcuacaaa

SEQ ID NO: 5742 - RNA, 19 nt, Artificial Sequence
  Synthetic
ccacagccaagcagauuaa

SEQ ID NO: 5743 - RNA, 19 nt, Artificial Sequence
  Synthetic
cugucgagagauagagaau

SEQ ID NO: 5744 - RNA, 19 nt, Artificial Sequence
  Synthetic
aggagaaguggcugaauga

SEQ ID NO: 5745 - RNA, 19 nt, Artificial Sequence
  Synthetic
cagacagacuccuaaccaa

SEQ ID NO: 5746 - RNA, 19 nt, Artificial Sequence
  Synthetic
ccuaagauuugaaacacuu

SEQ ID NO: 5747 - RNA, 19 nt, Artificial Sequence
  Synthetic
ggaucaaaguuaaaguuuc

SEQ ID NO: 5748 - RNA, 19 nt, Artificial Sequence
  Synthetic
agaacuaagccaggcauaa

SEQ ID NO: 5749 - RNA, 19 nt, Artificial Sequence
  Synthetic
gaggagguagcuaggguau

SEQ ID NO: 5750 - RNA, 19 nt, Artificial Sequence
  Synthetic
cagaauaggucuagaagaa

SEQ ID NO: 5751 - RNA, 19 nt, Artificial Sequence
  Synthetic
guagaaagauguacaagaa

SEQ ID NO: 5752 - RNA, 19 nt, Artificial Sequence
  Synthetic
agacugaaguuuugaagua

SEQ ID NO: 5753 - RNA, 19 nt, Artificial Sequence
  Synthetic
gcaguuagaaguuggaaua

SEQ ID NO: 5754 - RNA, 19 nt, Artificial Sequence
  Synthetic
cuacguuauuggaaagaaa

SEQ ID NO: 5755 - RNA, 19 nt, Artificial Sequence
  Synthetic
cagaugaaacagaggcuaa

SEQ ID NO: 5756 - RNA, 19 nt, Artificial Sequence
  Synthetic
cuuaagcauuucaggguaa

SEQ ID NO: 5757 - RNA, 19 nt, Artificial Sequence
  Synthetic
aaacagaaaucgaaacaga

SEQ ID NO: 5758 - RNA, 19 nt, Artificial Sequence
  Synthetic
gaauaggucuagaagaaga

SEQ ID NO: 5759 - RNA, 19 nt, Artificial Sequence
  Synthetic
gcacuugauauaagcaaua

SEQ ID NO: 5760 - RNA, 19 nt, Artificial Sequence
  Synthetic
cagaagaugugaagucgua

SEQ ID NO: 5761 - RNA, 19 nt, Artificial Sequence
  Synthetic
ccagcaagcuucugcacua

SEQ ID NO: 5762 - RNA, 19 nt, Artificial Sequence
  Synthetic
acagaaaucgaaacagaua

SEQ ID NO: 5763 - RNA, 19 nt, Artificial Sequence
  Synthetic
ccauugaugugcaaagcaa

SEQ ID NO: 5764 - RNA, 19 nt, Artificial Sequence
  Synthetic
cgaaacagauacagagaug

SEQ ID NO: 5765 - RNA, 19 nt, Artificial Sequence
  Synthetic
gaaacaggauucaguguga

SEQ ID NO: 5766 - RNA, 19 nt, Artificial Sequence
  Synthetic
gaacagaauaggucuagaa

SEQ ID NO: 5767 - RNA, 19 nt, Artificial Sequence
  Synthetic
ggugaaaccagaacaauau

SEQ ID NO: 5768 - RNA, 19 nt, Artificial Sequence
  Synthetic
gugcaaagcaagaccugaa

SEQ ID NO: 5769 - RNA, 19 nt, Artificial Sequence
  Synthetic
uggagaaagaaucgguuaa

SEQ ID NO: 5770 - RNA, 19 nt, Artificial Sequence
  Synthetic
caaaggaguuacaucuuaa

SEQ ID NO: 5771 - RNA, 19 nt, Artificial Sequence
  Synthetic
gagaugcuguuuaaagaaa

SEQ ID NO: 5772 - RNA, 19 nt, Artificial Sequence
  Synthetic
guuuaaagugagagaaucu

SEQ ID NO: 5773 - RNA, 19 nt, Artificial Sequence
  Synthetic
aagauacaauggaggagaa

SEQ ID NO: 5774 - RNA, 19 nt, Artificial Sequence
  Synthetic
gaugugaagucguauuaua

SEQ ID NO: 5775 - RNA, 19 nt, Artificial Sequence
  Synthetic
ccucacaguuguuuguuua

SEQ ID NO: 5776 - RNA, 19 nt, Artificial Sequence
  Synthetic
gugugaagcucuugucaga

SEQ ID NO: 5777 - RNA, 19 nt, Artificial Sequence
  Synthetic
gcaguagaauagacaucaa

SEQ ID NO: 5778 - RNA, 19 nt, Artificial Sequence
  Synthetic
ggagaaagaaucgguuaaa

SEQ ID NO: 5779 - RNA, 19 nt, Artificial Sequence
  Synthetic
aaacagaggcuaaaugaga

SEQ ID NO: 5780 - RNA, 19 nt, Artificial Sequence
  Synthetic
cagaagaccucaagggauu

SEQ ID NO: 5781 - RNA, 19 nt, Artificial Sequence
  Synthetic
ggaacaacgauuagaacaa

SEQ ID NO: 5782 - RNA, 19 nt, Artificial Sequence
  Synthetic
cauuagagcuggcaaauaa

SEQ ID NO: 5783 - RNA, 19 nt, Artificial Sequence
  Synthetic
ugaagaagcagcuggauaa

SEQ ID NO: 5784 - RNA, 19 nt, Artificial Sequence
  Synthetic
gagaagagcuuuagguacu

SEQ ID NO: 5785 - RNA, 19 nt, Artificial Sequence
  Synthetic
gagaagaggaugauggaca

SEQ ID NO: 5786 - RNA, 19 nt, Artificial Sequence
  Synthetic
agaagcagcuggauaaaua

SEQ ID NO: 5787 - RNA, 19 nt, Artificial Sequence
  Synthetic
cagaauaccugucaagauu

SEQ ID NO: 5788 - RNA, 19 nt, Artificial Sequence
  Synthetic
ggauaaauaugcauuggaa

SEQ ID NO: 5789 - RNA, 19 nt, Artificial Sequence
  Synthetic
cugaaaaugcagaaagaaa

SEQ ID NO: 5790 - RNA, 19 nt, Artificial Sequence
  Synthetic
agaaagaaaucgauuccaa

SEQ ID NO: 5791 - RNA, 19 nt, Artificial Sequence
  Synthetic
ccacaggccugaagaugaa

SEQ ID NO: 5792 - RNA, 19 nt, Artificial Sequence
  Synthetic
gcaccaacuccuuaaauaa

SEQ ID NO: 5793 - RNA, 19 nt, Artificial Sequence
  Synthetic
ggaagggagaagagcuuua

SEQ ID NO: 5794 - RNA, 19 nt, Artificial Sequence
  Synthetic
gcuauggagaagagagcua

SEQ ID NO: 5795 - RNA, 19 nt, Artificial Sequence
  Synthetic
caaauaaagaggagaccau

SEQ ID NO: 5796 - RNA, 19 nt, Artificial Sequence
  Synthetic
acacaagaauggaaggcau

SEQ ID NO: 5797 - RNA, 19 nt, Artificial Sequence
  Synthetic
ugcaggagguagagagaau

SEQ ID NO: 5798 - RNA, 19 nt, Artificial Sequence
  Synthetic
uagccaaggaagugacaua

SEQ ID NO: 5799 - RNA, 19 nt, Artificial Sequence
  Synthetic
acaaugaggugcuggacau

SEQ ID NO: 5800 - RNA, 19 nt, Artificial Sequence
  Synthetic
ggacuggcguggugauuuu

SEQ ID NO: 5801 - RNA, 19 nt, Artificial Sequence
  Synthetic
ggauccaacugcuuaauaa

SEQ ID NO: 5802 - RNA, 19 nt, Artificial Sequence
  Synthetic
ccuuacuacaucagaaaua

SEQ ID NO: 5803 - RNA, 19 nt, Artificial Sequence
  Synthetic
ugguaugggaacagggaau

SEQ ID NO: 5804 - RNA, 19 nt, Artificial Sequence
  Synthetic
cugaaaagcuccaggcuca

SEQ ID NO: 5805 - RNA, 19 nt, Artificial Sequence
  Synthetic
gggagaagagcuuuaggua

SEQ ID NO: 5806 - RNA, 19 nt, Artificial Sequence
  Synthetic
agaacaagcaauucagcua

SEQ ID NO: 5807 - RNA, 19 nt, Artificial Sequence
  Synthetic
uugaagaagcagcuggaua

SEQ ID NO: 5808 - RNA, 19 nt, Artificial Sequence
  Synthetic
gagcgugucuugaagguau

SEQ ID NO: 5809 - RNA, 19 nt, Artificial Sequence
  Synthetic
aggaggaggacgaggacuu

SEQ ID NO: 5810 - RNA, 19 nt, Artificial Sequence
  Synthetic
ccaaggagguggacagcaa

SEQ ID NO: 5811 - RNA, 19 nt, Artificial Sequence
  Synthetic
agaccaagcaagaguguaa

SEQ ID NO: 5812 - RNA, 19 nt, Artificial Sequence
  Synthetic
gcauuguauuccugagaaa

SEQ ID NO: 5813 - RNA, 19 nt, Artificial Sequence
  Synthetic
cuuuaggacuucugaaaua

SEQ ID NO: 5814 - RNA, 19 nt, Artificial Sequence
  Synthetic
gcugagaagcccaagaaua

SEQ ID NO: 5815 - RNA, 19 nt, Artificial Sequence
  Synthetic
guaugaaaugggaaagaaa

SEQ ID NO: 5816 - RNA, 19 nt, Artificial Sequence
  Synthetic
agauaaacauucuggaaca

SEQ ID NO: 5817 - RNA, 19 nt, Artificial Sequence
  Synthetic
cguaaugccucuaauguaa

SEQ ID NO: 5818 - RNA, 19 nt, Artificial Sequence
  Synthetic
ggauaauuccugagaacuu

SEQ ID NO: 5819 - RNA, 19 nt, Artificial Sequence
  Synthetic
gaacagagagucaagcaaa

SEQ ID NO: 5820 - RNA, 19 nt, Artificial Sequence
  Synthetic
cugagaagcccaagaauau

SEQ ID NO: 5821 - RNA, 19 nt, Artificial Sequence
  Synthetic
uuacauaccuuuaguggaa

SEQ ID NO: 5822 - RNA, 19 nt, Artificial Sequence
  Synthetic
caucugaaccaaagaaauu

SEQ ID NO: 5823 - RNA, 19 nt, Artificial Sequence
  Synthetic
guggaaaacuggaauauua

SEQ ID NO: 5824 - RNA, 19 nt, Artificial Sequence
  Synthetic
gcccaagaauaucaagaaa

SEQ ID NO: 5825 - RNA, 19 nt, Artificial Sequence
  Synthetic
uggaguaugaaaugggaaa

SEQ ID NO: 5826 - RNA, 19 nt, Artificial Sequence
  Synthetic
ucaaauaacuccagcucau

SEQ ID NO: 5827 - RNA, 19 nt, Artificial Sequence
  Synthetic
ccucagcugugaagguaaa

SEQ ID NO: 5828 - RNA, 19 nt, Artificial Sequence
  Synthetic
gcccaaagcaagaaaauua

SEQ ID NO: 5829 - RNA, 19 nt, Artificial Sequence
  Synthetic
acagaaugcuauaugagaa

SEQ ID NO: 5830 - RNA, 19 nt, Artificial Sequence
  Synthetic
gcugagaaugccaagaaua

SEQ ID NO: 5831 - RNA, 19 nt, Artificial Sequence
  Synthetic
ggauguacguuguuaccaa

SEQ ID NO: 5832 - RNA, 19 nt, Artificial Sequence
  Synthetic
uguaaaugcagcaggaaga

SEQ ID NO: 5833 - RNA, 19 nt, Artificial Sequence
  Synthetic
ggaggaugauuugggaaua

SEQ ID NO: 5834 - RNA, 19 nt, Artificial Sequence
  Synthetic
uggaaggacugguguuauu

SEQ ID NO: 5835 - RNA, 19 nt, Artificial Sequence
  Synthetic
ggcccaaucuauagaaaca

SEQ ID NO: 5836 - RNA, 19 nt, Artificial Sequence
  Synthetic
uugauacagcagagagaaa

SEQ ID NO: 5837 - RNA, 19 nt, Artificial Sequence
  Synthetic
ucacaaggaguaagaguuu

SEQ ID NO: 5838 - RNA, 19 nt, Artificial Sequence
  Synthetic
gagagaugcagcuggaauu

SEQ ID NO: 5839 - RNA, 19 nt, Artificial Sequence
  Synthetic
gaguauaccuuguaaaucu

SEQ ID NO: 5840 - RNA, 19 nt, Artificial Sequence
  Synthetic
acgcagaucuggagagcaa

SEQ ID NO: 5841 - RNA, 19 nt, Artificial Sequence
  Synthetic
ggaagaaacuugugcagau

SEQ ID NO: 5842 - RNA, 19 nt, Artificial Sequence
  Synthetic
uggccaagauugaggacaa

SEQ ID NO: 5843 - RNA, 19 nt, Artificial Sequence
  Synthetic
gugcacaggugguagauua

SEQ ID NO: 5844 - RNA, 19 nt, Artificial Sequence
  Synthetic
gcaaacagcggaugagcaa

SEQ ID NO: 5845 - RNA, 19 nt, Artificial Sequence
  Synthetic
acagggagcugaagaagaa

SEQ ID NO: 5846 - RNA, 19 nt, Artificial Sequence
  Synthetic
acucagagaugaagaaguu

SEQ ID NO: 5847 - RNA, 19 nt, Artificial Sequence
  Synthetic
uggcuaaggugcaggagau

SEQ ID NO: 5848 - RNA, 19 nt, Artificial Sequence
  Synthetic
gaagaauuauggagagaac

SEQ ID NO: 5849 - RNA, 19 nt, Artificial Sequence
  Synthetic
acaaugaagaacugaagaa

SEQ ID NO: 5850 - RNA, 19 nt, Artificial Sequence
  Synthetic
agauugaggacaagaauga

SEQ ID NO: 5851 - RNA, 19 nt, Artificial Sequence
  Synthetic
gagaaugggccaaguacau

SEQ ID NO: 5852 - RNA, 19 nt, Artificial Sequence
  Synthetic
gcaugcggcagcagagaaa

SEQ ID NO: 5853 - RNA, 19 nt, Artificial Sequence
  Synthetic
aguuuguccugaagaauua

SEQ ID NO: 5854 - RNA, 19 nt, Artificial Sequence
  Synthetic
cugaagaauuauggagaga

SEQ ID NO: 5855 - RNA, 19 nt, Artificial Sequence
  Synthetic
gagagaacccagaagccua

SEQ ID NO: 5856 - RNA, 19 nt, Artificial Sequence
  Synthetic
agaagucgauguuggacaa

SEQ ID NO: 5857 - RNA, 19 nt, Artificial Sequence
  Synthetic
aggcugagauggagaagca

SEQ ID NO: 5858 - RNA, 19 nt, Artificial Sequence
  Synthetic
cagaaggacuggaagaaac

SEQ ID NO: 5859 - RNA, 19 nt, Artificial Sequence
  Synthetic
gcagaaagugucagucauu

SEQ ID NO: 5860 - RNA, 19 nt, Artificial Sequence
  Synthetic
gagcagaaagugucaguca

SEQ ID NO: 5861 - RNA, 19 nt, Artificial Sequence
  Synthetic
gcugagauggagaagcaaa

SEQ ID NO: 5862 - RNA, 19 nt, Artificial Sequence
  Synthetic
agaaguuuguccugaagaa

SEQ ID NO: 5863 - RNA, 19 nt, Artificial Sequence
  Synthetic
ccuaugaggaccugaugaa

SEQ ID NO: 5864 - RNA, 19 nt, Artificial Sequence
  Synthetic
agaaguuguucgaggagca

SEQ ID NO: 5865 - RNA, 19 nt, Artificial Sequence
  Synthetic
augaggaccugaugaagaa

SEQ ID NO: 5866 - RNA, 19 nt, Artificial Sequence
  Synthetic
ccaagaaggacaacgacuu

SEQ ID NO: 5867 - RNA, 19 nt, Artificial Sequence
  Synthetic
gcagaggugaggcgagaau

SEQ ID NO: 5868 - RNA, 19 nt, Artificial Sequence
  Synthetic
ugaagaaguuuguccugaa

SEQ ID NO: 5869 - RNA, 19 nt, Artificial Sequence
  Synthetic
uggacaaccuugaugccua

SEQ ID NO: 5870 - RNA, 19 nt, Artificial Sequence
  Synthetic
ggguauuauugcagggaaa

SEQ ID NO: 5871 - RNA, 19 nt, Artificial Sequence
  Synthetic
guacagaccuuuaaaguua

SEQ ID NO: 5872 - RNA, 19 nt, Artificial Sequence
  Synthetic
gagaaaugcuggucacaaa

SEQ ID NO: 5873 - RNA, 19 nt, Artificial Sequence
  Synthetic
ggaguuacccaaagagaaa

SEQ ID NO: 5874 - RNA, 19 nt, Artificial Sequence
  Synthetic
guaauugaaccaugggaaa

SEQ ID NO: 5875 - RNA, 19 nt, Artificial Sequence
  Synthetic
ugaagaagguuuaguccaa

SEQ ID NO: 5876 - RNA, 19 nt, Artificial Sequence
  Synthetic
gcaacaagauggugugguu

SEQ ID NO: 5877 - RNA, 19 nt, Artificial Sequence
  Synthetic
ugacaggauuguagcaaau

SEQ ID NO: 5878 - RNA, 19 nt, Artificial Sequence
  Synthetic
gaucagaaguugucacuca

SEQ ID NO: 5879 - RNA, 19 nt, Artificial Sequence
  Synthetic
gcagggaaaugaagauuau

SEQ ID NO: 5880 - RNA, 19 nt, Artificial Sequence
  Synthetic
auaaagaugugcugccuua

SEQ ID NO: 5881 - RNA, 19 nt, Artificial Sequence
  Synthetic
ggaagaacacacagugaca

SEQ ID NO: 5882 - RNA, 19 nt, Artificial Sequence
  Synthetic
gaaaagagcuucuaguaau

SEQ ID NO: 5883 - RNA, 19 nt, Artificial Sequence
  Synthetic
gugacaggauuguagcaaa

SEQ ID NO: 5884 - RNA, 19 nt, Artificial Sequence
  Synthetic
gggaucaaaucguguuaau

SEQ ID NO: 5885 - RNA, 19 nt, Artificial Sequence
  Synthetic
caccagaugaagauggaaa

SEQ ID NO: 5886 - RNA, 19 nt, Artificial Sequence
  Synthetic
gugaauaccguguuaaauu

SEQ ID NO: 5887 - RNA, 19 nt, Artificial Sequence
  Synthetic
gcacgaaauccgaaagcca

SEQ ID NO: 5888 - RNA, 19 nt, Artificial Sequence
  Synthetic
gccuaugugucccgagaaa

SEQ ID NO: 5889 - RNA, 19 nt, Artificial Sequence
  Synthetic
aaggauaaacccagaguca

SEQ ID NO: 5890 - RNA, 19 nt, Artificial Sequence
  Synthetic
cagauaaccuugcaaauga

SEQ ID NO: 5891 - RNA, 19 nt, Artificial Sequence
  Synthetic
cauaggaacugguguagau

SEQ ID NO: 5892 - RNA, 19 nt, Artificial Sequence
  Synthetic
ccauuuacccacuggauau

SEQ ID NO: 5893 - RNA, 19 nt, Artificial Sequence
  Synthetic
agguggagcuggaacaauu

SEQ ID NO: 5894 - RNA, 19 nt, Artificial Sequence
  Synthetic
agagaaaacucgaucagaa

SEQ ID NO: 5895 - RNA, 19 nt, Artificial Sequence
  Synthetic
gauccauggcacagcuaaa

SEQ ID NO: 5896 - RNA, 19 nt, Artificial Sequence
  Synthetic
gggaacauauuguggccuu

SEQ ID NO: 5897 - RNA, 19 nt, Artificial Sequence
  Synthetic
agaccuaaugauuggaauu

SEQ ID NO: 5898 - RNA, 19 nt, Artificial Sequence
  Synthetic
gaacgagggcggaccaaau

SEQ ID NO: 5899 - RNA, 19 nt, Artificial Sequence
  Synthetic
gaucaaaucguguuaauca

SEQ ID NO: 5900 - RNA, 19 nt, Artificial Sequence
  Synthetic
gcaugaaucuagagaaaca

SEQ ID NO: 5901 - RNA, 19 nt, Artificial Sequence
  Synthetic
uugcaugaaucuagagaaa

SEQ ID NO: 5902 - RNA, 19 nt, Artificial Sequence
  Synthetic
gcaaauaaagacaggguau

SEQ ID NO: 5903 - RNA, 19 nt, Artificial Sequence
  Synthetic
gcaacaagaucuagaaagu

SEQ ID NO: 5904 - RNA, 19 nt, Artificial Sequence
  Synthetic
ccaaauuaccucagaauau

SEQ ID NO: 5905 - RNA, 19 nt, Artificial Sequence
  Synthetic
gagaaacauuauugggauu

SEQ ID NO: 5906 - RNA, 19 nt, Artificial Sequence
  Synthetic
ccaguauauuccugagaaa

SEQ ID NO: 5907 - RNA, 19 nt, Artificial Sequence
  Synthetic
ccuauuuaaccaagagaaa

SEQ ID NO: 5908 - RNA, 19 nt, Artificial Sequence
  Synthetic
gcugaugauuccacagaua

SEQ ID NO: 5909 - RNA, 19 nt, Artificial Sequence
  Synthetic
ugaagaaggcuuuguuaaa

SEQ ID NO: 5910 - RNA, 19 nt, Artificial Sequence
  Synthetic
augcaagggaucagaguaa

SEQ ID NO: 5911 - RNA, 19 nt, Artificial Sequence
  Synthetic
caauaaggaagcagcuaaa

SEQ ID NO: 5912 - RNA, 19 nt, Artificial Sequence
  Synthetic
gaucagaguaacaaugaaa

SEQ ID NO: 5913 - RNA, 19 nt, Artificial Sequence
  Synthetic
guggaaagcauguguagaa

SEQ ID NO: 5914 - RNA, 19 nt, Artificial Sequence
  Synthetic
ccaacaaguuacaagaaga

SEQ ID NO: 5915 - RNA, 19 nt, Artificial Sequence
  Synthetic
gcacggaaauuaauggauu

SEQ ID NO: 5916 - RNA, 19 nt, Artificial Sequence
  Synthetic
gaaugaaaccugaugaaaa

SEQ ID NO: 5917 - RNA, 19 nt, Artificial Sequence
  Synthetic
caaacaaaccaauaaggaa

SEQ ID NO: 5918 - RNA, 19 nt, Artificial Sequence
  Synthetic
gcgaaguguuuguaaauca

SEQ ID NO: 5919 - RNA, 19 nt, Artificial Sequence
  Synthetic
gcagaugacuugggaacaa

SEQ ID NO: 5920 - RNA, 19 nt, Artificial Sequence
  Synthetic
caacaaguuacaagaagaa

SEQ ID NO: 5921 - RNA, 19 nt, Artificial Sequence
  Synthetic
caauguaaagggaggauau

SEQ ID NO: 5922 - RNA, 19 nt, Artificial Sequence
  Synthetic
ggaagaaaagcuagaaaau

SEQ ID NO: 5923 - RNA, 19 nt, Artificial Sequence
  Synthetic
caggaggaauucugauuua

SEQ ID NO: 5924 - RNA, 19 nt, Artificial Sequence
  Synthetic
ccaauaaggaagcagcuaa

SEQ ID NO: 5925 - RNA, 19 nt, Artificial Sequence
  Synthetic
gcaaagaaaaggcaaauaa

SEQ ID NO: 5926 - RNA, 19 nt, Artificial Sequence
  Synthetic
gggaaguaguaagcagaaa

SEQ ID NO: 5927 - RNA, 19 nt, Artificial Sequence
  Synthetic
gaacaggguacgaaugaau

SEQ ID NO: 5928 - RNA, 19 nt, Artificial Sequence
  Synthetic
ggaaguaguaagcagaaau

SEQ ID NO: 5929 - RNA, 19 nt, Artificial Sequence
  Synthetic
aagaggagguggagaagga

SEQ ID NO: 5930 - RNA, 19 nt, Artificial Sequence
  Synthetic
aggagaagaucgaggauga

SEQ ID NO: 5931 - RNA, 19 nt, Artificial Sequence
  Synthetic
cgagaaaugcaccgaguau

SEQ ID NO: 5932 - RNA, 19 nt, Artificial Sequence
  Synthetic
ggucacagaacgccacaaa

SEQ ID NO: 5933 - RNA, 19 nt, Artificial Sequence
  Synthetic
cgaggagaugaacgagaaa

SEQ ID NO: 5934 - RNA, 19 nt, Artificial Sequence
  Synthetic
gccaggagugagagagaga

SEQ ID NO: 5935 - RNA, 19 nt, Artificial Sequence
  Synthetic
gcugcaacgaggagggcuu

SEQ ID NO: 5936 - RNA, 19 nt, Artificial Sequence
  Synthetic
gaacuuuguggauccgaaa

SEQ ID NO: 5937 - RNA, 19 nt, Artificial Sequence
  Synthetic
agcgaggccugaagcauua

SEQ ID NO: 5938 - RNA, 19 nt, Artificial Sequence
  Synthetic
gcccgagacuccuguguuu

SEQ ID NO: 5939 - RNA, 19 nt, Artificial Sequence
  Synthetic
guacgacgguguugagauc

SEQ ID NO: 5940 - RNA, 19 nt, Artificial Sequence
  Synthetic
acgaggagggcuuuggcua

SEQ ID NO: 5941 - RNA, 19 nt, Artificial Sequence
  Synthetic
gucaugagccucuacgaaa

SEQ ID NO: 5942 - RNA, 19 nt, Artificial Sequence
  Synthetic
gggaggaguuugagaguuu

SEQ ID NO: 5943 - RNA, 19 nt, Artificial Sequence
  Synthetic
ugacagagcugguggagua

SEQ ID NO: 5944 - RNA, 19 nt, Artificial Sequence
  Synthetic
cagacaaggagaagagcaa

SEQ ID NO: 5945 - RNA, 19 nt, Artificial Sequence
  Synthetic
gggaggagaaagugaagaa

SEQ ID NO: 5946 - RNA, 19 nt, Artificial Sequence
  Synthetic
gagaaaggccggaacaaau

SEQ ID NO: 5947 - RNA, 19 nt, Artificial Sequence
  Synthetic
agaacaagagggaggagaa

SEQ ID NO: 5948 - RNA, 19 nt, Artificial Sequence
  Synthetic
ggccagagaacaagggcaa

SEQ ID NO: 5949 - RNA, 19 nt, Artificial Sequence
  Synthetic
gaacaagagggaggagaaa

SEQ ID NO: 5950 - RNA, 19 nt, Artificial Sequence
  Synthetic
ggagaaaggccggaacaaa

SEQ ID NO: 5951 - RNA, 19 nt, Artificial Sequence
  Synthetic
aggagaaagugaagaagca

SEQ ID NO: 5952 - RNA, 19 nt, Artificial Sequence
  Synthetic
aggaggaaguggcugauua

SEQ ID NO: 5953 - RNA, 19 nt, Artificial Sequence
  Synthetic
ggucagcagacaaggagaa

SEQ ID NO: 5954 - RNA, 19 nt, Artificial Sequence
  Synthetic
gcaagaaccgcuacaagaa

SEQ ID NO: 5955 - RNA, 19 nt, Artificial Sequence
  Synthetic
ggacguuucuugugcguga

SEQ ID NO: 5956 - RNA, 19 nt, Artificial Sequence
  Synthetic
agaagcaggaggugaagaa

SEQ ID NO: 5957 - RNA, 19 nt, Artificial Sequence
  Synthetic
agacggaggcgcaguacaa

SEQ ID NO: 5958 - RNA, 19 nt, Artificial Sequence
  Synthetic
ccaacuacaucaagaacca

SEQ ID NO: 5959 - RNA, 19 nt, Artificial Sequence
  Synthetic
ggaacaaaugcgucccaua

SEQ ID NO: 5960 - RNA, 19 nt, Artificial Sequence
  Synthetic
agaagaagcuggagguccu

SEQ ID NO: 5961 - RNA, 19 nt, Artificial Sequence
  Synthetic
ugacacaaccgaauacaaa

SEQ ID NO: 5962 - RNA, 19 nt, Artificial Sequence
  Synthetic
gagcaugacacaaccgaau

SEQ ID NO: 5963 - RNA, 19 nt, Artificial Sequence
  Synthetic
acaaggaggauguguauga

SEQ ID NO: 5964 - RNA, 19 nt, Artificial Sequence
  Synthetic
acacuaagaacaagaggga

SEQ ID NO: 5965 - RNA, 19 nt, Artificial Sequence
  Synthetic
aggaggauguguaugagaa

SEQ ID NO: 5966 - RNA, 19 nt, Artificial Sequence
  Synthetic
auacaaacuccguaccuua

SEQ ID NO: 5967 - RNA, 19 nt, Artificial Sequence
  Synthetic
gggagaaguuugcgacucu

SEQ ID NO: 5968 - RNA, 19 nt, Artificial Sequence
  Synthetic
gggccuggacugugacauu

SEQ ID NO: 5969 - RNA, 19 nt, Artificial Sequence
  Synthetic
aaauaaagcccugggauca

SEQ ID NO: 5970 - RNA, 19 nt, Artificial Sequence
  Synthetic
acaagagggaggagaaagu

SEQ ID NO: 5971 - RNA, 19 nt, Artificial Sequence
  Synthetic
cagagcugguggaguacua

SEQ ID NO: 5972 - RNA, 19 nt, Artificial Sequence
  Synthetic
gcugaaagcccgaggagaa

SEQ ID NO: 5973 - RNA, 19 nt, Artificial Sequence
  Synthetic
ccacagaagaggaaaccua

SEQ ID NO: 5974 - RNA, 19 nt, Artificial Sequence
  Synthetic
gaguacaccuagagagcuu

SEQ ID NO: 5975 - RNA, 19 nt, Artificial Sequence
  Synthetic
ccaagcaacuggaagaaga

SEQ ID NO: 5976 - RNA, 19 nt, Artificial Sequence
  Synthetic
ccaaauagauccuguccuu

SEQ ID NO: 5977 - RNA, 19 nt, Artificial Sequence
  Synthetic
agaacaaggacucugguua

SEQ ID NO: 5978 - RNA, 19 nt, Artificial Sequence
  Synthetic
ccaagaagcaugugcgacu

SEQ ID NO: 5979 - RNA, 19 nt, Artificial Sequence
  Synthetic
gcuaugacgggaaggagaa

SEQ ID NO: 5980 - RNA, 19 nt, Artificial Sequence
  Synthetic
ugaaagagugcccagaaua

SEQ ID NO: 5981 - RNA, 19 nt, Artificial Sequence
  Synthetic
gguacaagcuccagaacag

SEQ ID NO: 5982 - RNA, 19 nt, Artificial Sequence
  Synthetic
ccgagagggcaaggagaaa

SEQ ID NO: 5983 - RNA, 19 nt, Artificial Sequence
  Synthetic
uggcagagguggaggagag

SEQ ID NO: 5984 - RNA, 19 nt, Artificial Sequence
  Synthetic
agacagaccgacagacaga

SEQ ID NO: 5985 - RNA, 19 nt, Artificial Sequence
  Synthetic
ugaagaacacgcagugcua

SEQ ID NO: 5986 - RNA, 19 nt, Artificial Sequence
  Synthetic
gagauuacaucaaugccaa

SEQ ID NO: 5987 - RNA, 19 nt, Artificial Sequence
  Synthetic
gcacaggccagaugcaaga

SEQ ID NO: 5988 - RNA, 19 nt, Artificial Sequence
  Synthetic
ccaucagacaccagaauca

SEQ ID NO: 5989 - RNA, 19 nt, Artificial Sequence
  Synthetic
cagaauacacugugcggca

SEQ ID NO: 5990 - RNA, 19 nt, Artificial Sequence
  Synthetic
aaguggacauucuggguau

SEQ ID NO: 5991 - RNA, 19 nt, Artificial Sequence
  Synthetic
acaggaagcagcagcagua

SEQ ID NO: 5992 - RNA, 19 nt, Artificial Sequence
  Synthetic
cggcagagcaguaccaguu

SEQ ID NO: 5993 - RNA, 19 nt, Artificial Sequence
  Synthetic
gagcacagccguugaccuu

SEQ ID NO: 5994 - RNA, 19 nt, Artificial Sequence
  Synthetic
gcauccaggacaugaaaga

SEQ ID NO: 5995 - RNA, 19 nt, Artificial Sequence
  Synthetic
gugucggacuucugggaga

SEQ ID NO: 5996 - RNA, 19 nt, Artificial Sequence
  Synthetic
gggaaagugggccgaguga

SEQ ID NO: 5997 - RNA, 19 nt, Artificial Sequence
  Synthetic
acgggaaggagaaggucua

SEQ ID NO: 5998 - RNA, 19 nt, Artificial Sequence
  Synthetic
augaaagagugcccagaau

SEQ ID NO: 5999 - RNA, 19 nt, Artificial Sequence
  Synthetic
caacuacauccgaggcuau

SEQ ID NO: 6000 - RNA, 19 nt, Artificial Sequence
  Synthetic
gggagaugguguggcaaga

SEQ ID NO: 6001 - RNA, 19 nt, Artificial Sequence
  Synthetic
caagcaacuggaagaagaa

SEQ ID NO: 6002 - RNA, 19 nt, Artificial Sequence
  Synthetic
gagaauaccuaucgugauu

SEQ ID NO: 6003 - RNA, 19 nt, Artificial Sequence
  Synthetic
gcaaggaaucuaugaggaa

SEQ ID NO: 6004 - RNA, 19 nt, Artificial Sequence
  Synthetic
gcuacagagugguggaaga

SEQ ID NO: 6005 - RNA, 19 nt, Artificial Sequence
  Synthetic
gaucagaccucaauaauuu

SEQ ID NO: 6006 - RNA, 19 nt, Artificial Sequence
  Synthetic
ggagaggauucaaauauua

SEQ ID NO: 6007 - RNA, 19 nt, Artificial Sequence
  Synthetic
ggaccaaacuagagugaag

SEQ ID NO: 6008 - RNA, 19 nt, Artificial Sequence
  Synthetic
gcuuugaaacucagaggaa

SEQ ID NO: 6009 - RNA, 19 nt, Artificial Sequence
  Synthetic
aaggaaucuaugaggaaua

SEQ ID NO: 6010 - RNA, 19 nt, Artificial Sequence
  Synthetic
cuagauaaauguggugaaa

SEQ ID NO: 6011 - RNA, 19 nt, Artificial Sequence
  Synthetic
ggaauggacugguguuuau

SEQ ID NO: 6012 - RNA, 19 nt, Artificial Sequence
  Synthetic
ggaaggaaggcauuguaaa

SEQ ID NO: 6013 - RNA, 19 nt, Artificial Sequence
  Synthetic
caaacuagagugaagcuaa

SEQ ID NO: 6014 - RNA, 19 nt, Artificial Sequence
  Synthetic
gaggaaggcggcaggagaa

SEQ ID NO: 6015 - RNA, 19 nt, Artificial Sequence
  Synthetic
cagagaaacucgaaggaag

SEQ ID NO: 6016 - RNA, 19 nt, Artificial Sequence
  Synthetic
ucgcagagaaggagggcau

SEQ ID NO: 6017 - RNA, 19 nt, Artificial Sequence
  Synthetic
ucuugagaguggucagaaa

SEQ ID NO: 6018 - RNA, 19 nt, Artificial Sequence
  Synthetic
agacauucgucgugagaac

SEQ ID NO: 6019 - RNA, 19 nt, Artificial Sequence
  Synthetic
gaaaacaacgcuagaaauu

SEQ ID NO: 6020 - RNA, 19 nt, Artificial Sequence
  Synthetic
gggagaggauucaaauauu

SEQ ID NO: 6021 - RNA, 19 nt, Artificial Sequence
  Synthetic
gaacggagcgaauaauaua

SEQ ID NO: 6022 - RNA, 19 nt, Artificial Sequence
  Synthetic
uccaggaaaccuagagaaa

SEQ ID NO: 6023 - RNA, 19 nt, Artificial Sequence
  Synthetic
ggccauacucagacagauu

SEQ ID NO: 6024 - RNA, 19 nt, Artificial Sequence
  Synthetic
aaacaacgcuagaaauuca

SEQ ID NO: 6025 - RNA, 19 nt, Artificial Sequence
  Synthetic
caguacuggccuuuagaaa

SEQ ID NO: 6026 - RNA, 19 nt, Artificial Sequence
  Synthetic
ugaagaaggugcugauugu

SEQ ID NO: 6027 - RNA, 19 nt, Artificial Sequence
  Synthetic
guaauaagcucuuugaaug

SEQ ID NO: 6028 - RNA, 19 nt, Artificial Sequence
  Synthetic
cgggagaggauucaaauau

SEQ ID NO: 6029 - RNA, 19 nt, Artificial Sequence
  Synthetic
gcguggagaacaugaauca

SEQ ID NO: 6030 - RNA, 19 nt, Artificial Sequence
  Synthetic
ccaagcacguuuauaagua

SEQ ID NO: 6031 - RNA, 19 nt, Artificial Sequence
  Synthetic
ggaacggagcgaauaauau

SEQ ID NO: 6032 - RNA, 19 nt, Artificial Sequence
  Synthetic
ggacagaagagaugagaca

SEQ ID NO: 6033 - RNA, 19 nt, Artificial Sequence
  Synthetic
gauuagaggaggaguuuaa

SEQ ID NO: 6034 - RNA, 19 nt, Artificial Sequence
  Synthetic
ggagaauggcagacgacaa

SEQ ID NO: 6035 - RNA, 19 nt, Artificial Sequence
  Synthetic
ucucagagcucucgaggaa

SEQ ID NO: 6036 - RNA, 19 nt, Artificial Sequence
  Synthetic
aagaagaaacggugaauga

SEQ ID NO: 6037 - RNA, 19 nt, Artificial Sequence
  Synthetic
cggcagaaccaguuaaaga

SEQ ID NO: 6038 - RNA, 19 nt, Artificial Sequence
  Synthetic
ggacaagcuggaagaggaa

SEQ ID NO: 6039 - RNA, 19 nt, Artificial Sequence
  Synthetic
cagccaacaugaagaagaa

SEQ ID NO: 6040 - RNA, 19 nt, Artificial Sequence
  Synthetic
caguuaaagaagaggccaa

SEQ ID NO: 6041 - RNA, 19 nt, Artificial Sequence
  Synthetic
gaagaagaaccguguuuua

SEQ ID NO: 6042 - RNA, 19 nt, Artificial Sequence
  Synthetic
ggaugaugcaguucaaaua

SEQ ID NO: 6043 - RNA, 19 nt, Artificial Sequence
  Synthetic
cgaagagaauacagacuau

SEQ ID NO: 6044 - RNA, 19 nt, Artificial Sequence
  Synthetic
gggacuaucagguaauaaa

SEQ ID NO: 6045 - RNA, 19 nt, Artificial Sequence
  Synthetic
gcgacaugaccaacagaaa

SEQ ID NO: 6046 - RNA, 19 nt, Artificial Sequence
  Synthetic
gcuacaagguggugcagga

SEQ ID NO: 6047 - RNA, 19 nt, Artificial Sequence
  Synthetic
ggaauuaaauagugugaug

SEQ ID NO: 6048 - RNA, 19 nt, Artificial Sequence
  Synthetic
aggaggaaugugagagcua

SEQ ID NO: 6049 - RNA, 19 nt, Artificial Sequence
  Synthetic
acaagguggugcaggagua

SEQ ID NO: 6050 - RNA, 19 nt, Artificial Sequence
  Synthetic
ccaaccugaaggagagaaa

SEQ ID NO: 6051 - RNA, 19 nt, Artificial Sequence
  Synthetic
gaacguggcuuccagauaa

SEQ ID NO: 6052 - RNA, 19 nt, Artificial Sequence
  Synthetic
gaagaaacggugaaugauu

SEQ ID NO: 6053 - RNA, 19 nt, Artificial Sequence
  Synthetic
gagaauaagagccggcaga

SEQ ID NO: 6054 - RNA, 19 nt, Artificial Sequence
  Synthetic
gcaccaacauucagcccaa

SEQ ID NO: 6055 - RNA, 19 nt, Artificial Sequence
  Synthetic
gguaauggaugaugcaguu

SEQ ID NO: 6056 - RNA, 19 nt, Artificial Sequence
  Synthetic
cuucauucaucaacgguua

SEQ ID NO: 6057 - RNA, 19 nt, Artificial Sequence
  Synthetic
gaagugaccucucuagaaa

SEQ ID NO: 6058 - RNA, 19 nt, Artificial Sequence
  Synthetic
gcgaagagaauacagacua

SEQ ID NO: 6059 - RNA, 19 nt, Artificial Sequence
  Synthetic
aggaggaguuuaagaaguu

SEQ ID NO: 6060 - RNA, 19 nt, Artificial Sequence
  Synthetic
gagaauggcagacgacaau

SEQ ID NO: 6061 - RNA, 19 nt, Artificial Sequence
  Synthetic
acaauaagcucuucaggga

SEQ ID NO: 6062 - RNA, 19 nt, Artificial Sequence
  Synthetic
cugaagagcuccuggauaa

SEQ ID NO: 6063 - RNA, 19 nt, Artificial Sequence
  Synthetic
gcaaagaccuccuggaaau

SEQ ID NO: 6064 - RNA, 19 nt, Artificial Sequence
  Synthetic
caguauuaguggagacuua

SEQ ID NO: 6065 - RNA, 19 nt, Artificial Sequence
  Synthetic
gagcagagauggagagcuu

SEQ ID NO: 6066 - RNA, 19 nt, Artificial Sequence
  Synthetic
ggacaaagccugacaagau

SEQ ID NO: 6067 - RNA, 19 nt, Artificial Sequence
  Synthetic
ccagaaagguaaccggaaa

SEQ ID NO: 6068 - RNA, 19 nt, Artificial Sequence
  Synthetic
ccaauggagcugugaaaua

SEQ ID NO: 6069 - RNA, 19 nt, Artificial Sequence
  Synthetic
uagcagaaugggagaaaua

SEQ ID NO: 6070 - RNA, 19 nt, Artificial Sequence
  Synthetic
gagccauggucgagaaaga

SEQ ID NO: 6071 - RNA, 19 nt, Artificial Sequence
  Synthetic
aggaauacgaggaguuaaa

SEQ ID NO: 6072 - RNA, 19 nt, Artificial Sequence
  Synthetic
ccucagagcaagaaagcua

SEQ ID NO: 6073 - RNA, 19 nt, Artificial Sequence
  Synthetic
gaguaaagugugaccauua

SEQ ID NO: 6074 - RNA, 19 nt, Artificial Sequence
  Synthetic
cagaacauuuccagacaaa

SEQ ID NO: 6075 - RNA, 19 nt, Artificial Sequence
  Synthetic
ccaaagaugccaaagaauu

SEQ ID NO: 6076 - RNA, 19 nt, Artificial Sequence
  Synthetic
agaaaguacuucauggaau

SEQ ID NO: 6077 - RNA, 19 nt, Artificial Sequence
  Synthetic
ccaaagacucuguggacau

SEQ ID NO: 6078 - RNA, 19 nt, Artificial Sequence
  Synthetic
gcaagaaauacaagauaca

SEQ ID NO: 6079 - RNA, 19 nt, Artificial Sequence
  Synthetic
gccggagaauagagggaaa

SEQ ID NO: 6080 - RNA, 19 nt, Artificial Sequence
  Synthetic
caaggaauccagaguauua

SEQ ID NO: 6081 - RNA, 19 nt, Artificial Sequence
  Synthetic
ccggagauguggauaacua

SEQ ID NO: 6082 - RNA, 19 nt, Artificial Sequence
  Synthetic
ggcugaugcuaauggauaa

SEQ ID NO: 6083 - RNA, 19 nt, Artificial Sequence
  Synthetic
gguucaaauucaagaaagu

SEQ ID NO: 6084 - RNA, 19 nt, Artificial Sequence
  Synthetic
uaagauaugcggugaggaa

SEQ ID NO: 6085 - RNA, 19 nt, Artificial Sequence
  Synthetic
acaaggagacguagaauuu

SEQ ID NO: 6086 - RNA, 19 nt, Artificial Sequence
  Synthetic
ccacuaagcaacacaaauu

SEQ ID NO: 6087 - RNA, 19 nt, Artificial Sequence
  Synthetic
gcuaauggauaaagggauc

SEQ ID NO: 6088 - RNA, 19 nt, Artificial Sequence
  Synthetic
cugacaaaguccagggagu

SEQ ID NO: 6089 - RNA, 19 nt, Artificial Sequence
  Synthetic
ccaaggaauacgaggaguu

SEQ ID NO: 6090 - RNA, 19 nt, Artificial Sequence
  Synthetic
gcaaggaagcccagacuga

SEQ ID NO: 6091 - RNA, 19 nt, Artificial Sequence
  Synthetic
cugggaauguggaacgaua

SEQ ID NO: 6092 - RNA, 19 nt, Artificial Sequence
  Synthetic
cagaagagguaguggauau

SEQ ID NO: 6093 - RNA, 19 nt, Artificial Sequence
  Synthetic
cagcaaagcuaaauguuaa

SEQ ID NO: 6094 - RNA, 19 nt, Artificial Sequence
  Synthetic
ggaaaugaguaaagagagu

SEQ ID NO: 6095 - RNA, 19 nt, Artificial Sequence
  Synthetic
gguaaaagcucuacgcaaa

SEQ ID NO: 6096 - RNA, 19 nt, Artificial Sequence
  Synthetic
gcauuaagaagguaaguaa

SEQ ID NO: 6097 - RNA, 19 nt, Artificial Sequence
  Synthetic
gugcauaaccuuacagaau

SEQ ID NO: 6098 - RNA, 19 nt, Artificial Sequence
  Synthetic
cuuugagacuauugagaua

SEQ ID NO: 6099 - RNA, 19 nt, Artificial Sequence
  Synthetic
ggacacagcacauuggaaa

SEQ ID NO: 6100 - RNA, 19 nt, Artificial Sequence
  Synthetic
gaacagaaagccacaguua

SEQ ID NO: 6101 - RNA, 19 nt, Artificial Sequence
  Synthetic
caaacaaugaggugcauaa

SEQ ID NO: 6102 - RNA, 19 nt, Artificial Sequence
  Synthetic
ggaugaaacuguugaugau

SEQ ID NO: 6103 - RNA, 19 nt, Artificial Sequence
  Synthetic
ugacagugauucagaggaa

SEQ ID NO: 6104 - RNA, 19 nt, Artificial Sequence
  Synthetic
acacagagaugcugcaaau

SEQ ID NO: 6105 - RNA, 19 nt, Artificial Sequence
  Synthetic
cauuggaaaucaagaagaa

SEQ ID NO: 6106 - RNA, 19 nt, Artificial Sequence
  Synthetic
gagaaacagaagugaauuu

SEQ ID NO: 6107 - RNA, 19 nt, Artificial Sequence
  Synthetic
ccucaaagaucauuucaua

SEQ ID NO: 6108 - RNA, 19 nt, Artificial Sequence
  Synthetic
ggaacaagugugcagaaua

SEQ ID NO: 6109 - RNA, 19 nt, Artificial Sequence
  Synthetic
aagcaaacauauggagaua

SEQ ID NO: 6110 - RNA, 19 nt, Artificial Sequence
  Synthetic
cagagaugcugcaaauaaa

SEQ ID NO: 6111 - RNA, 19 nt, Artificial Sequence
  Synthetic
gaaauacucugguuagaaa

SEQ ID NO: 6112 - RNA, 19 nt, Artificial Sequence
  Synthetic
guaaagagagugagcauga

SEQ ID NO: 6113 - RNA, 19 nt, Artificial Sequence
  Synthetic
caaacaucacuguggauua

SEQ ID NO: 6114 - RNA, 19 nt, Artificial Sequence
  Synthetic
gaauggacaaguaaagaaa

SEQ ID NO: 6115 - RNA, 19 nt, Artificial Sequence
  Synthetic
gaugauuucuggaggauga

SEQ ID NO: 6116 - RNA, 19 nt, Artificial Sequence
  Synthetic
ucaaagaacccaggaaaua

SEQ ID NO: 6117 - RNA, 19 nt, Artificial Sequence
  Synthetic
ggcuuaaacucuuggcauu

SEQ ID NO: 6118 - RNA, 19 nt, Artificial Sequence
  Synthetic
gaggaagauugcugaugaa

SEQ ID NO: 6119 - RNA, 19 nt, Artificial Sequence
  Synthetic
aaacugagaaggagaguga

SEQ ID NO: 6120 - RNA, 19 nt, Artificial Sequence
  Synthetic
caggagagccucagauuau

SEQ ID NO: 6121 - RNA, 19 nt, Artificial Sequence
  Synthetic
gaagauugcugaugaagga

SEQ ID NO: 6122 - RNA, 19 nt, Artificial Sequence
  Synthetic
gaagaaaucucgcgggaaa

SEQ ID NO: 6123 - RNA, 19 nt, Artificial Sequence
  Synthetic
ugaaaugggcagagagaaa

SEQ ID NO: 6124 - RNA, 19 nt, Artificial Sequence
  Synthetic
gaagaaagaucaaggguga

SEQ ID NO: 6125 - RNA, 19 nt, Artificial Sequence
  Synthetic
ccaaaguggucaagaauau

SEQ ID NO: 6126 - RNA, 19 nt, Artificial Sequence
  Synthetic
ggagagaaguugaauuaaa

SEQ ID NO: 6127 - RNA, 19 nt, Artificial Sequence
  Synthetic
caguauauccuaagggaau

SEQ ID NO: 6128 - RNA, 19 nt, Artificial Sequence
  Synthetic
ccagaaaucacuugguuua

SEQ ID NO: 6129 - RNA, 19 nt, Artificial Sequence
  Synthetic
gaucaagggugaaguguga

SEQ ID NO: 6130 - RNA, 19 nt, Artificial Sequence
  Synthetic
gaauggagcucgaauuuaa

SEQ ID NO: 6131 - RNA, 19 nt, Artificial Sequence
  Synthetic
gaggauaucaggugcauua

SEQ ID NO: 6132 - RNA, 19 nt, Artificial Sequence
  Synthetic
ccucaaauaaugugggaga

SEQ ID NO: 6133 - RNA, 19 nt, Artificial Sequence
  Synthetic
aauagaaacgggagagaau

SEQ ID NO: 6134 - RNA, 19 nt, Artificial Sequence
  Synthetic
ccacauugaaagauugaaa

SEQ ID NO: 6135 - RNA, 19 nt, Artificial Sequence
  Synthetic
ggaaagaaugagauaugaa

SEQ ID NO: 6136 - RNA, 19 nt, Artificial Sequence
  Synthetic
cgucauagaugccauguua

SEQ ID NO: 6137 - RNA, 19 nt, Artificial Sequence
  Synthetic
ggagaggagcaacgaauua

SEQ ID NO: 6138 - RNA, 19 nt, Artificial Sequence
  Synthetic
ucaaauaaugugggagaaa

SEQ ID NO: 6139 - RNA, 19 nt, Artificial Sequence
  Synthetic
ugggagagaaguugaauua

SEQ ID NO: 6140 - RNA, 19 nt, Artificial Sequence
  Synthetic
gggaggagauggugaagga

SEQ ID NO: 6141 - RNA, 19 nt, Artificial Sequence
  Synthetic
gguucaaacagaagaccaa

SEQ ID NO: 6142 - RNA, 19 nt, Artificial Sequence
  Synthetic
ucuuuaugaugaugggaaa

SEQ ID NO: 6143 - RNA, 19 nt, Artificial Sequence
  Synthetic
ugucaaagccuuacccaaa

SEQ ID NO: 6144 - RNA, 19 nt, Artificial Sequence
  Synthetic
ccgaagugccagcuagaaa

SEQ ID NO: 6145 - RNA, 19 nt, Artificial Sequence
  Synthetic
ugacaagccucacgagauu

SEQ ID NO: 6146 - RNA, 19 nt, Artificial Sequence
  Synthetic
ccaacuacauagaugggua

SEQ ID NO: 6147 - RNA, 19 nt, Artificial Sequence
  Synthetic
ccauguaacuuuaaugaga

SEQ ID NO: 6148 - RNA, 19 nt, Artificial Sequence
  Synthetic
ggaaaaugguagaagaagu

SEQ ID NO: 6149 - RNA, 19 nt, Artificial Sequence
  Synthetic
gaagaucacuuuacagcua

SEQ ID NO: 6150 - RNA, 19 nt, Artificial Sequence
  Synthetic
gguaauagaguuugacgau

SEQ ID NO: 6151 - RNA, 19 nt, Artificial Sequence
  Synthetic
agaagagagaagugagaca

SEQ ID NO: 6152 - RNA, 19 nt, Artificial Sequence
  Synthetic
cuacauagaugguuacaaa

SEQ ID NO: 6153 - RNA, 19 nt, Artificial Sequence
  Synthetic
gaaagaaaggaaagaggaa

SEQ ID NO: 6154 - RNA, 19 nt, Artificial Sequence
  Synthetic
cgauugagauaaagaauga

SEQ ID NO: 6155 - RNA, 19 nt, Artificial Sequence
  Synthetic
gaggaggaguucaggaaau

SEQ ID NO: 6156 - RNA, 19 nt, Artificial Sequence
  Synthetic
aagaaaggaaagaggaaaa

SEQ ID NO: 6157 - RNA, 19 nt, Artificial Sequence
  Synthetic
aggagagagagcaggauaa

SEQ ID NO: 6158 - RNA, 19 nt, Artificial Sequence
  Synthetic
ccucagggcccaagaagua

SEQ ID NO: 6159 - RNA, 19 nt, Artificial Sequence
  Synthetic
gcuacaaagugguacaaga

SEQ ID NO: 6160 - RNA, 19 nt, Artificial Sequence
  Synthetic
gguuacaaagagaagaaua

SEQ ID NO: 6161 - RNA, 19 nt, Artificial Sequence
  Synthetic
aguuacucauggagaaaua

SEQ ID NO: 6162 - RNA, 19 nt, Artificial Sequence
  Synthetic
cggaggugcaggagagaga

SEQ ID NO: 6163 - RNA, 19 nt, Artificial Sequence
  Synthetic
gcgaacagguacauucaua

SEQ ID NO: 6164 - RNA, 19 nt, Artificial Sequence
  Synthetic
acaaagugguacaagauuu

SEQ ID NO: 6165 - RNA, 19 nt, Artificial Sequence
  Synthetic
ccaaacaggaaacgguuaa

SEQ ID NO: 6166 - RNA, 19 nt, Artificial Sequence
  Synthetic
cuuccuacauagaugguua

SEQ ID NO: 6167 - RNA, 19 nt, Artificial Sequence
  Synthetic
gaguaaaagccgagggacu

SEQ ID NO: 6168 - RNA, 19 nt, Artificial Sequence
  Synthetic
ggauaaaugcuaccaguau

SEQ ID NO: 6169 - RNA, 19 nt, Artificial Sequence
  Synthetic
caucaaugcuuccuacaua

SEQ ID NO: 6170 - RNA, 19 nt, Artificial Sequence
  Synthetic
gagaauggucugggagcaa

SEQ ID NO: 6171 - RNA, 19 nt, Artificial Sequence
  Synthetic
ggaucaugaaggagaacau

SEQ ID NO: 6172 - RNA, 19 nt, Artificial Sequence
  Synthetic
caggagagagagcaggaua

SEQ ID NO: 6173 - RNA, 19 nt, Artificial Sequence
  Synthetic
cgagggacuuuuagaugua

SEQ ID NO: 6174 - RNA, 19 nt, Artificial Sequence
  Synthetic
gauaaaugcuaccaguauu

SEQ ID NO: 6175 - RNA, 19 nt, Artificial Sequence
  Synthetic
ggagaaauaacgauugaga

SEQ ID NO: 6176 - RNA, 19 nt, Artificial Sequence
  Synthetic
ggucaaauaauaucccaua

SEQ ID NO: 6177 - RNA, 19 nt, Artificial Sequence
  Synthetic
ggucaagaauacacagacu

SEQ ID NO: 6178 - RNA, 19 nt, Artificial Sequence
  Synthetic
caucaguauacgagacuuu

SEQ ID NO: 6179 - RNA, 19 nt, Artificial Sequence
  Synthetic
gguucaggaagcagaggaa

SEQ ID NO: 6180 - RNA, 19 nt, Artificial Sequence
  Synthetic
augaagaaggccaggguca

SEQ ID NO: 6181 - RNA, 19 nt, Artificial Sequence
  Synthetic
ggagagagagcaggauaaa

SEQ ID NO: 6182 - RNA, 19 nt, Artificial Sequence
  Synthetic
gcauaauucuugaugguaa

SEQ ID NO: 6183 - RNA, 19 nt, Artificial Sequence
  Synthetic
gaggagaagucccggguaa

SEQ ID NO: 6184 - RNA, 19 nt, Artificial Sequence
  Synthetic
gugccaagcuacaggagaa

SEQ ID NO: 6185 - RNA, 19 nt, Artificial Sequence
  Synthetic
ccauggagcucgaguucaa

SEQ ID NO: 6186 - RNA, 19 nt, Artificial Sequence
  Synthetic
ggagaugggcagggagaaa

SEQ ID NO: 6187 - RNA, 19 nt, Artificial Sequence
  Synthetic
ucagcuaaaugcagggaaa

SEQ ID NO: 6188 - RNA, 19 nt, Artificial Sequence
  Synthetic
gauagagagcagugaggaa

SEQ ID NO: 6189 - RNA, 19 nt, Artificial Sequence
  Synthetic
ccaacuacaucgauggcua

SEQ ID NO: 6190 - RNA, 19 nt, Artificial Sequence
  Synthetic
ugacacggcuggaggagaa

SEQ ID NO: 6191 - RNA, 19 nt, Artificial Sequence
  Synthetic
ccuuuaagauucuguacaa

SEQ ID NO: 6192 - RNA, 19 nt, Artificial Sequence
  Synthetic
gugaggaguucgagaagga

SEQ ID NO: 6193 - RNA, 19 nt, Artificial Sequence
  Synthetic
agacagaggaccaguauca

SEQ ID NO: 6194 - RNA, 19 nt, Artificial Sequence
  Synthetic
agcugaaggugguggagaa

SEQ ID NO: 6195 - RNA, 19 nt, Artificial Sequence
  Synthetic
cggcagaggacgaagacca

SEQ ID NO: 6196 - RNA, 19 nt, Artificial Sequence
  Synthetic
ggagaauggugugggaaca

SEQ ID NO: 6197 - RNA, 19 nt, Artificial Sequence
  Synthetic
acgaagaccaacagcacaa

SEQ ID NO: 6198 - RNA, 19 nt, Artificial Sequence
  Synthetic
cagaaggccuacauagcua

SEQ ID NO: 6199 - RNA, 19 nt, Artificial Sequence
  Synthetic
ccaagacaggcgagggauu

SEQ ID NO: 6200 - RNA, 19 nt, Artificial Sequence
  Synthetic
ucuagaagccaucgagcaa

SEQ ID NO: 6201 - RNA, 19 nt, Artificial Sequence
  Synthetic
ccggagaugcuguggguga

SEQ ID NO: 6202 - RNA, 19 nt, Artificial Sequence
  Synthetic
acgagaagacgguggacau

SEQ ID NO: 6203 - RNA, 19 nt, Artificial Sequence
  Synthetic
cagcaguucacgugggaga

SEQ ID NO: 6204 - RNA, 19 nt, Artificial Sequence
  Synthetic
cggaugagaucguggucca

SEQ ID NO: 6205 - RNA, 19 nt, Artificial Sequence
  Synthetic
ggaugaagcacgagaagac

SEQ ID NO: 6206 - RNA, 19 nt, Artificial Sequence
  Synthetic
cagcaaaggcucuggccca

SEQ ID NO: 6207 - RNA, 19 nt, Artificial Sequence
  Synthetic
ccauggaccagaagcgcua

SEQ ID NO: 6208 - RNA, 19 nt, Artificial Sequence
  Synthetic
cuggagaaguggacggagu

SEQ ID NO: 6209 - RNA, 19 nt, Artificial Sequence
  Synthetic
ucaccgaccuggcggacaa

SEQ ID NO: 6210 - RNA, 19 nt, Artificial Sequence
  Synthetic
ccgaggaacuggagcugga

SEQ ID NO: 6211 - RNA, 19 nt, Artificial Sequence
  Synthetic
agaagacgguggacaucua

SEQ ID NO: 6212 - RNA, 19 nt, Artificial Sequence
  Synthetic
caaacuauguugaugguua

SEQ ID NO: 6213 - RNA, 19 nt, Artificial Sequence
  Synthetic
gcgaaauaguggaguggau

SEQ ID NO: 6214 - RNA, 19 nt, Artificial Sequence
  Synthetic
cagagaacagugaggaaua

SEQ ID NO: 6215 - RNA, 19 nt, Artificial Sequence
  Synthetic
ccacauacuacgaaagauu

SEQ ID NO: 6216 - RNA, 19 nt, Artificial Sequence
  Synthetic
guggaguaucugagaaaua

SEQ ID NO: 6217 - RNA, 19 nt, Artificial Sequence
  Synthetic
gaagauuucuggaggauga

SEQ ID NO: 6218 - RNA, 19 nt, Artificial Sequence
  Synthetic
cgguggaguaucugagaaa

SEQ ID NO: 6219 - RNA, 19 nt, Artificial Sequence
  Synthetic
gcuaauaccacucgaauau

SEQ ID NO: 6220 - RNA, 19 nt, Artificial Sequence
  Synthetic
gcaagaacuuauucaacaa

SEQ ID NO: 6221 - RNA, 19 nt, Artificial Sequence
  Synthetic
ggaaagacacgacuggaaa

SEQ ID NO: 6222 - RNA, 19 nt, Artificial Sequence
  Synthetic
caguuaacguccugggauu

SEQ ID NO: 6223 - RNA, 19 nt, Artificial Sequence
  Synthetic
aaauaaaguccaagggcuu

SEQ ID NO: 6224 - RNA, 19 nt, Artificial Sequence
  Synthetic
gaacaucacugcagagcau

SEQ ID NO: 6225 - RNA, 19 nt, Artificial Sequence
  Synthetic
gagaaggagaagacguuua

SEQ ID NO: 6226 - RNA, 19 nt, Artificial Sequence
  Synthetic
ggaccaagaaugaggacga

SEQ ID NO: 6227 - RNA, 19 nt, Artificial Sequence
  Synthetic
gaacaucccuuauuaguua

SEQ ID NO: 6228 - RNA, 19 nt, Artificial Sequence
  Synthetic
gcacuaaagaaaauggaaa

SEQ ID NO: 6229 - RNA, 19 nt, Artificial Sequence
  Synthetic
gggaagaauaccaggaacu

SEQ ID NO: 6230 - RNA, 19 nt, Artificial Sequence
  Synthetic
gaaccguguugguggauuu

SEQ ID NO: 6231 - RNA, 19 nt, Artificial Sequence
  Synthetic
uuacgaaccuuguggaaaa

SEQ ID NO: 6232 - RNA, 19 nt, Artificial Sequence
  Synthetic
ccaagaaugaggacgagaa

SEQ ID NO: 6233 - RNA, 19 nt, Artificial Sequence
  Synthetic
gcgacuacauuaaugcaaa

SEQ ID NO: 6234 - RNA, 19 nt, Artificial Sequence
  Synthetic
gcucagaaagaguguaaca

SEQ ID NO: 6235 - RNA, 19 nt, Artificial Sequence
  Synthetic
ggaaaagacucuaagcaca

SEQ ID NO: 6236 - RNA, 19 nt, Artificial Sequence
  Synthetic
ucagaaagaguguaacaaa

SEQ ID NO: 6237 - RNA, 19 nt, Artificial Sequence
  Synthetic
aggagagaaggaugagaaa

SEQ ID NO: 6238 - RNA, 19 nt, Artificial Sequence
  Synthetic
acagaagccucuaaaguuu

SEQ ID NO: 6239 - RNA, 19 nt, Artificial Sequence
  Synthetic
aggagaagacguuuacaaa

SEQ ID NO: 6240 - RNA, 19 nt, Artificial Sequence
  Synthetic
ggaaugaaaggaacagauu

SEQ ID NO: 6241 - RNA, 19 nt, Artificial Sequence
  Synthetic
aggaaggagagaaggauga

SEQ ID NO: 6242 - RNA, 19 nt, Artificial Sequence
  Synthetic
ggagaaagacggaguaaau

SEQ ID NO: 6243 - RNA, 19 nt, Artificial Sequence
  Synthetic
guaaggaagaugagagaga

SEQ ID NO: 6244 - RNA, 19 nt, Artificial Sequence
  Synthetic
gggugaagugugagcauua

SEQ ID NO: 6245 - RNA, 19 nt, Artificial Sequence
  Synthetic
ccaagaaccgcuacagaaa

SEQ ID NO: 6246 - RNA, 19 nt, Artificial Sequence
  Synthetic
gugaggaagugauggagaa

SEQ ID NO: 6247 - RNA, 19 nt, Artificial Sequence
  Synthetic
aggaagaaugagagggaca

SEQ ID NO: 6248 - RNA, 19 nt, Artificial Sequence
  Synthetic
ucacagaucuccagaauga

SEQ ID NO: 6249 - RNA, 19 nt, Artificial Sequence
  Synthetic
agaaugaaacucagacuaa

SEQ ID NO: 6250 - RNA, 19 nt, Artificial Sequence
  Synthetic
ccaaaucagucuucuauaa

SEQ ID NO: 6251 - RNA, 19 nt, Artificial Sequence
  Synthetic
gaaugaaggucgugucuca

SEQ ID NO: 6252 - RNA, 19 nt, Artificial Sequence
  Synthetic
cuguguggguggagaaaga

SEQ ID NO: 6253 - RNA, 19 nt, Artificial Sequence
  Synthetic
ggucauugccggagccuuu

SEQ ID NO: 6254 - RNA, 19 nt, Artificial Sequence
  Synthetic
gcccauacccucaggacua

SEQ ID NO: 6255 - RNA, 19 nt, Artificial Sequence
  Synthetic
ccgugugggcagagaggaa

SEQ ID NO: 6256 - RNA, 19 nt, Artificial Sequence
  Synthetic
gaguggaggcucagaccaa

SEQ ID NO: 6257 - RNA, 19 nt, Artificial Sequence
  Synthetic
cugaagaggaggaauaaga

SEQ ID NO: 6258 - RNA, 19 nt, Artificial Sequence
  Synthetic
ggucacagaucuccagaau

SEQ ID NO: 6259 - RNA, 19 nt, Artificial Sequence
  Synthetic
agaaugagagggacagcaa

SEQ ID NO: 6260 - RNA, 19 nt, Artificial Sequence
  Synthetic
ggaaagaauggaaucaaca

SEQ ID NO: 6261 - RNA, 19 nt, Artificial Sequence
  Synthetic
ggaauaagaagaagcagca

SEQ ID NO: 6262 - RNA, 19 nt, Artificial Sequence
  Synthetic
cucccaacccagugagaaa

SEQ ID NO: 6263 - RNA, 19 nt, Artificial Sequence
  Synthetic
gaaugaggucagaggcuau

SEQ ID NO: 6264 - RNA, 19 nt, Artificial Sequence
  Synthetic
ggaaugaggucagaggcua

SEQ ID NO: 6265 - RNA, 19 nt, Artificial Sequence
  Synthetic
acagaaaugugcugcccua

SEQ ID NO: 6266 - RNA, 19 nt, Artificial Sequence
  Synthetic
ccacagaacucgaccuacu

SEQ ID NO: 6267 - RNA, 19 nt, Artificial Sequence
  Synthetic
cguaugaggaugucgaaaa

SEQ ID NO: 6268 - RNA, 19 nt, Artificial Sequence
  Synthetic
guaaauagcuccucgugga

SEQ ID NO: 6269 - RNA, 19 nt, Artificial Sequence
  Synthetic
caguggaggcucagaccaa

SEQ ID NO: 6270 - RNA, 19 nt, Artificial Sequence
  Synthetic
ugacaucacccuaaaggaa

SEQ ID NO: 6271 - RNA, 19 nt, Artificial Sequence
  Synthetic
cguugauggugcagacuga

SEQ ID NO: 6272 - RNA, 19 nt, Artificial Sequence
  Synthetic
ggaaagaugcaaagaauaa

SEQ ID NO: 6273 - RNA, 19 nt, Artificial Sequence
  Synthetic
cugcagauguccugaaaua

SEQ ID NO: 6274 - RNA, 19 nt, Artificial Sequence
  Synthetic
gaggaaagaugcaaagaau

SEQ ID NO: 6275 - RNA, 19 nt, Artificial Sequence
  Synthetic
ccucauaagaacagaagaa

SEQ ID NO: 6276 - RNA, 19 nt, Artificial Sequence
  Synthetic
ggaaagaaucgcuauaaua

SEQ ID NO: 6277 - RNA, 19 nt, Artificial Sequence
  Synthetic
caaauaagacaaagggaga

SEQ ID NO: 6278 - RNA, 19 nt, Artificial Sequence
  Synthetic
gcguaugguuugggagaaa

SEQ ID NO: 6279 - RNA, 19 nt, Artificial Sequence
  Synthetic
gaaccaaaugugaggagua

SEQ ID NO: 6280 - RNA, 19 nt, Artificial Sequence
  Synthetic
acucaagacuucaggucaa

SEQ ID NO: 6281 - RNA, 19 nt, Artificial Sequence
  Synthetic
ugaaauugacguugggaau

SEQ ID NO: 6282 - RNA, 19 nt, Artificial Sequence
  Synthetic
ggucaaguucaguggauuu

SEQ ID NO: 6283 - RNA, 19 nt, Artificial Sequence
  Synthetic
ccauagaguucaggacaaa

SEQ ID NO: 6284 - RNA, 19 nt, Artificial Sequence
  Synthetic
aggaaagaugcaaagaaua

SEQ ID NO: 6285 - RNA, 19 nt, Artificial Sequence
  Synthetic
uaaucagaguggagaauuu

SEQ ID NO: 6286 - RNA, 19 nt, Artificial Sequence
  Synthetic
caacgauaguuuaagaaca

SEQ ID NO: 6287 - RNA, 19 nt, Artificial Sequence
  Synthetic
cuuuaauggugcagacaga

SEQ ID NO: 6288 - RNA, 19 nt, Artificial Sequence
  Synthetic
guaaagcauaagauggaaa

SEQ ID NO: 6289 - RNA, 19 nt, Artificial Sequence
  Synthetic
aggaauaggcaaugagacu

SEQ ID NO: 6290 - RNA, 19 nt, Artificial Sequence
  Synthetic
cagcagaauccuuucauaa

SEQ ID NO: 6291 - RNA, 19 nt, Artificial Sequence
  Synthetic
ggcaaugacaucagaaauu

SEQ ID NO: 6292 - RNA, 19 nt, Artificial Sequence
  Synthetic
gccauagaguucaggacaa

SEQ ID NO: 6293 - RNA, 19 nt, Artificial Sequence
  Synthetic
uggagaauuuugaggccua

SEQ ID NO: 6294 - RNA, 19 nt, Artificial Sequence
  Synthetic
gaaauaaccaccaaccaaa

SEQ ID NO: 6295 - RNA, 19 nt, Artificial Sequence
  Synthetic
gaacacaacugcaaugaca

SEQ ID NO: 6296 - RNA, 19 nt, Artificial Sequence
  Synthetic
uuuaagaacaccugaacaa

SEQ ID NO: 6297 - RNA, 19 nt, Artificial Sequence
  Synthetic
ugagaauagaggaaagaau

SEQ ID NO: 6298 - RNA, 19 nt, Artificial Sequence
  Synthetic
caucauacacaguggagau

SEQ ID NO: 6299 - RNA, 19 nt, Artificial Sequence
  Synthetic
gaacggaagucacguauuu

SEQ ID NO: 6300 - RNA, 19 nt, Artificial Sequence
  Synthetic
gaucagcaguacagcagaa

SEQ ID NO: 6301 - RNA, 19 nt, Artificial Sequence
  Synthetic
ccaagcaggcucaggacua

SEQ ID NO: 6302 - RNA, 19 nt, Artificial Sequence
  Synthetic
caacauaacuuuaguccaa

SEQ ID NO: 6303 - RNA, 19 nt, Artificial Sequence
  Synthetic
ggagauuaguguaugauua

SEQ ID NO: 6304 - RNA, 19 nt, Artificial Sequence
  Synthetic
gccaaagacucaaguguaa

SEQ ID NO: 6305 - RNA, 19 nt, Artificial Sequence
  Synthetic
gaauagacucccagacuaa

SEQ ID NO: 6306 - RNA, 19 nt, Artificial Sequence
  Synthetic
guaaagacacugaggaaca

SEQ ID NO: 6307 - RNA, 19 nt, Artificial Sequence
  Synthetic
uguacaugcuugugaauua

SEQ ID NO: 6308 - RNA, 19 nt, Artificial Sequence
  Synthetic
acgaaauggagaagauaua

SEQ ID NO: 6309 - RNA, 19 nt, Artificial Sequence
  Synthetic
gguaauauuugaagcugaa

SEQ ID NO: 6310 - RNA, 19 nt, Artificial Sequence
  Synthetic
gaacauagccuuuaagcau

SEQ ID NO: 6311 - RNA, 19 nt, Artificial Sequence
  Synthetic
ccacuaaucaccagaacaa

SEQ ID NO: 6312 - RNA, 19 nt, Artificial Sequence
  Synthetic
gagacgaaauggagaagau

SEQ ID NO: 6313 - RNA, 19 nt, Artificial Sequence
  Synthetic
gaaggagagugaagagaca

SEQ ID NO: 6314 - RNA, 19 nt, Artificial Sequence
  Synthetic
caauaugagaucagcuaua

SEQ ID NO: 6315 - RNA, 19 nt, Artificial Sequence
  Synthetic
gcaauugggucuuuuaaua

SEQ ID NO: 6316 - RNA, 19 nt, Artificial Sequence
  Synthetic
ggagaaagcacauuauauu

SEQ ID NO: 6317 - RNA, 19 nt, Artificial Sequence
  Synthetic
caucaaucauagaagguuu

SEQ ID NO: 6318 - RNA, 19 nt, Artificial Sequence
  Synthetic
ccaacuauauugauggcua

SEQ ID NO: 6319 - RNA, 19 nt, Artificial Sequence
  Synthetic
gggaauacccggcaggaga

SEQ ID NO: 6320 - RNA, 19 nt, Artificial Sequence
  Synthetic
gugcauugccacagggaga

SEQ ID NO: 6321 - RNA, 19 nt, Artificial Sequence
  Synthetic
caaaguaacguguguagaa

SEQ ID NO: 6322 - RNA, 19 nt, Artificial Sequence
  Synthetic
aggaagggaugcuacgaua

SEQ ID NO: 6323 - RNA, 19 nt, Artificial Sequence
  Synthetic
gagaucagcuauagcagua

SEQ ID NO: 6324 - RNA, 19 nt, Artificial Sequence
  Synthetic
cuacaaugaaggagaacga

SEQ ID NO: 6325 - RNA, 19 nt, Artificial Sequence
  Synthetic
gcaaagaugccauggggaa

SEQ ID NO: 6326 - RNA, 19 nt, Artificial Sequence
  Synthetic
gcuugaaacuucucccaaa

SEQ ID NO: 6327 - RNA, 19 nt, Artificial Sequence
  Synthetic
ccaaugaauaucagguaau

SEQ ID NO: 6328 - RNA, 19 nt, Artificial Sequence
  Synthetic
gaauguaugucuuguucaa

SEQ ID NO: 6329 - RNA, 19 nt, Artificial Sequence
  Synthetic
acauccaaguacugaguua

SEQ ID NO: 6330 - RNA, 19 nt, Artificial Sequence
  Synthetic
ccagagacgaaauggagaa

SEQ ID NO: 6331 - RNA, 19 nt, Artificial Sequence
  Synthetic
caaugaaauccgugaaguu

SEQ ID NO: 6332 - RNA, 19 nt, Artificial Sequence
  Synthetic
ugaaggagguguuggaaua

SEQ ID NO: 6333 - RNA, 19 nt, Artificial Sequence
  Synthetic
gcaauuauaucgaugguua

SEQ ID NO: 6334 - RNA, 19 nt, Artificial Sequence
  Synthetic
ccuaauagaaacagaacua

SEQ ID NO: 6335 - RNA, 19 nt, Artificial Sequence
  Synthetic
ccacaguacuggccagaaa

SEQ ID NO: 6336 - RNA, 19 nt, Artificial Sequence
  Synthetic
acaaguggcaagaggaaua

SEQ ID NO: 6337 - RNA, 19 nt, Artificial Sequence
  Synthetic
ggacaaguggcaagaggaa

SEQ ID NO: 6338 - RNA, 19 nt, Artificial Sequence
  Synthetic
ggacauggccgaaagggaa

SEQ ID NO: 6339 - RNA, 19 nt, Artificial Sequence
  Synthetic
caauagaaggagacacaaa

SEQ ID NO: 6340 - RNA, 19 nt, Artificial Sequence
  Synthetic
ggagacugguccuggauua

SEQ ID NO: 6341 - RNA, 19 nt, Artificial Sequence
  Synthetic
gugaagacacugaggaaca

SEQ ID NO: 6342 - RNA, 19 nt, Artificial Sequence
  Synthetic
uagaaguaguggaggucaa

SEQ ID NO: 6343 - RNA, 19 nt, Artificial Sequence
  Synthetic
gaauauaucuggagaccca

SEQ ID NO: 6344 - RNA, 19 nt, Artificial Sequence
  Synthetic
cagaugacacagagauaua

SEQ ID NO: 6345 - RNA, 19 nt, Artificial Sequence
  Synthetic
agaacaagugcgagaagaa

SEQ ID NO: 6346 - RNA, 19 nt, Artificial Sequence
  Synthetic
acucaauggacaagagcua

SEQ ID NO: 6347 - RNA, 19 nt, Artificial Sequence
  Synthetic
aaauaguuguugaggaaga

SEQ ID NO: 6348 - RNA, 19 nt, Artificial Sequence
  Synthetic
gaagaaguaagcugggaua

SEQ ID NO: 6349 - RNA, 19 nt, Artificial Sequence
  Synthetic
ggaagaacguccucgaaga

SEQ ID NO: 6350 - RNA, 19 nt, Artificial Sequence
  Synthetic
aaacagaacuacuggcaga

SEQ ID NO: 6351 - RNA, 19 nt, Artificial Sequence
  Synthetic
augcagaguugguaguuaa

SEQ ID NO: 6352 - RNA, 19 nt, Artificial Sequence
  Synthetic
cagaaaucuuaaagugcua

SEQ ID NO: 6353 - RNA, 19 nt, Artificial Sequence
  Synthetic
ggauacagcucaacgccaa

SEQ ID NO: 6354 - RNA, 19 nt, Artificial Sequence
  Synthetic
ggugaaugccucugggaga

SEQ ID NO: 6355 - RNA, 19 nt, Artificial Sequence
  Synthetic
gccaagaagcggaaagaga

SEQ ID NO: 6356 - RNA, 19 nt, Artificial Sequence
  Synthetic
agugauaacuucuggacau

SEQ ID NO: 6357 - RNA, 19 nt, Artificial Sequence
  Synthetic
ggaaaguaccgcugcauga

SEQ ID NO: 6358 - RNA, 19 nt, Artificial Sequence
  Synthetic
ggacaucaucagcaggaua

SEQ ID NO: 6359 - RNA, 19 nt, Artificial Sequence
  Synthetic
caccaaugucagugugaaa

SEQ ID NO: 6360 - RNA, 19 nt, Artificial Sequence
  Synthetic
cuacuuugcugcagaauuu

SEQ ID NO: 6361 - RNA, 19 nt, Artificial Sequence
  Synthetic
cagacaaacucaagccaga

SEQ ID NO: 6362 - RNA, 19 nt, Artificial Sequence
  Synthetic
uggcauacauggaggauca

SEQ ID NO: 6363 - RNA, 19 nt, Artificial Sequence
  Synthetic
gcccaagggugcaggaaga

SEQ ID NO: 6364 - RNA, 19 nt, Artificial Sequence
  Synthetic
gaauaaaguuaguguguug

SEQ ID NO: 6365 - RNA, 19 nt, Artificial Sequence
  Synthetic
gagugaagcugcuggagau

SEQ ID NO: 6366 - RNA, 19 nt, Artificial Sequence
  Synthetic
gcccagcagcagaggaaua

SEQ ID NO: 6367 - RNA, 19 nt, Artificial Sequence
  Synthetic
gaagagucaggaagggaaa

SEQ ID NO: 6368 - RNA, 19 nt, Artificial Sequence
  Synthetic
ccacgaaguccuuguucaa

SEQ ID NO: 6369 - RNA, 19 nt, Artificial Sequence
  Synthetic
gcagccaggaggagaggaa

SEQ ID NO: 6370 - RNA, 19 nt, Artificial Sequence
  Synthetic
ggaaggugaacaagugcua

SEQ ID NO: 6371 - RNA, 19 nt, Artificial Sequence
  Synthetic
caaaaggagugaaggagau

SEQ ID NO: 6372 - RNA, 19 nt, Artificial Sequence
  Synthetic
gacacaugauucuggcaua

SEQ ID NO: 6373 - RNA, 19 nt, Artificial Sequence
  Synthetic
gcucuaaggaccaguuuga

SEQ ID NO: 6374 - RNA, 19 nt, Artificial Sequence
  Synthetic
ggugaagucugaacuggaa

SEQ ID NO: 6375 - RNA, 19 nt, Artificial Sequence
  Synthetic
gugaauaaaguuagugugu

SEQ ID NO: 6376 - RNA, 19 nt, Artificial Sequence
  Synthetic
agacagggcuccaaaucuu

SEQ ID NO: 6377 - RNA, 19 nt, Artificial Sequence
  Synthetic
ggacauggguagcaauucu

SEQ ID NO: 6378 - RNA, 19 nt, Artificial Sequence
  Synthetic
gcacagacagggcuccaaa

SEQ ID NO: 6379 - RNA, 19 nt, Artificial Sequence
  Synthetic
gaaaggacauggguagcaa

SEQ ID NO: 6380 - RNA, 19 nt, Artificial Sequence
  Synthetic
gagugaaggagauugacau

SEQ ID NO: 6381 - RNA, 19 nt, Artificial Sequence
  Synthetic
caagggugcaggaagaaau

SEQ ID NO: 6382 - RNA, 19 nt, Artificial Sequence
  Synthetic
ggagugaaggagauugaca

SEQ ID NO: 6383 - RNA, 19 nt, Artificial Sequence
  Synthetic
cuaaggaccaguuugaauu

SEQ ID NO: 6384 - RNA, 19 nt, Artificial Sequence
  Synthetic
ucuaaggaccaguuugaau

SEQ ID NO: 6385 - RNA, 19 nt, Artificial Sequence
  Synthetic
aagcagggcuggugaaguc

SEQ ID NO: 6386 - RNA, 19 nt, Artificial Sequence
  Synthetic
uggagcugauaucaagaaa

SEQ ID NO: 6387 - RNA, 19 nt, Artificial Sequence
  Synthetic
ggaggcagcugcaguccuu

SEQ ID NO: 6388 - RNA, 19 nt, Artificial Sequence
  Synthetic
ggaaaggacauggguagca

SEQ ID NO: 6389 - RNA, 19 nt, Artificial Sequence
  Synthetic
ggaagucuguauucaggau

SEQ ID NO: 6390 - RNA, 19 nt, Artificial Sequence
  Synthetic
gcaggaaggugaacaagug

SEQ ID NO: 6391 - RNA, 19 nt, Artificial Sequence
  Synthetic
gcaccuacauccucaucga

SEQ ID NO: 6392 - RNA, 19 nt, Artificial Sequence
  Synthetic
ccuuauguuugaagagaaa

SEQ ID NO: 6393 - RNA, 19 nt, Artificial Sequence
  Synthetic
caaaggugcuaaagagauu

SEQ ID NO: 6394 - RNA, 19 nt, Artificial Sequence
  Synthetic
ggugugagauauacaaaua

SEQ ID NO: 6395 - RNA, 19 nt, Artificial Sequence
  Synthetic
ugaagaaccugcagaccaa

SEQ ID NO: 6396 - RNA, 19 nt, Artificial Sequence
  Synthetic
ccacggauguugucaggaa

SEQ ID NO: 6397 - RNA, 19 nt, Artificial Sequence
  Synthetic
aagacaaacuggaggaaac

SEQ ID NO: 6398 - RNA, 19 nt, Artificial Sequence
  Synthetic
ggaaaccucuggacugaaa

SEQ ID NO: 6399 - RNA, 19 nt, Artificial Sequence
  Synthetic
uggagaacgucaagagcca

SEQ ID NO: 6400 - RNA, 19 nt, Artificial Sequence
  Synthetic
uggcagauggugugggaga

SEQ ID NO: 6401 - RNA, 19 nt, Artificial Sequence
  Synthetic
gcgucuggauggaguguuu

SEQ ID NO: 6402 - RNA, 19 nt, Artificial Sequence
  Synthetic
gggaggagaacgugcccaa

SEQ ID NO: 6403 - RNA, 19 nt, Artificial Sequence
  Synthetic
gggaaucgguucaucaauu

SEQ ID NO: 6404 - RNA, 19 nt, Artificial Sequence
  Synthetic
ggacagugguguggacaga

SEQ ID NO: 6405 - RNA, 19 nt, Artificial Sequence
  Synthetic
acaagaaccggcuggagaa

SEQ ID NO: 6406 - RNA, 19 nt, Artificial Sequence
  Synthetic
ccacaaccaggaagaacaa

SEQ ID NO: 6407 - RNA, 19 nt, Artificial Sequence
  Synthetic
aaagagagauuuguggaaa

SEQ ID NO: 6408 - RNA, 19 nt, Artificial Sequence
  Synthetic
aggaccaccugaagaacaa

SEQ ID NO: 6409 - RNA, 19 nt, Artificial Sequence
  Synthetic
gcagugaccuucaaaguga

SEQ ID NO: 6410 - RNA, 19 nt, Artificial Sequence
  Synthetic
gcaccuacguccugaucga

SEQ ID NO: 6411 - RNA, 19 nt, Artificial Sequence
  Synthetic
gccagaagguuccggcaau

SEQ ID NO: 6412 - RNA, 19 nt, Artificial Sequence
  Synthetic
gggccguucuuguccaaua

SEQ ID NO: 6413 - RNA, 19 nt, Artificial Sequence
  Synthetic
guagagaugauucggauuu

SEQ ID NO: 6414 - RNA, 19 nt, Artificial Sequence
  Synthetic
gucaagagccagacguauu

SEQ ID NO: 6415 - RNA, 19 nt, Artificial Sequence
  Synthetic
gugcuaaagagauugauau

SEQ ID NO: 6416 - RNA, 19 nt, Artificial Sequence
  Synthetic
gaacaaaucugggcauuga

SEQ ID NO: 6417 - RNA, 19 nt, Artificial Sequence
  Synthetic
agacgaaggagcaguuuga

SEQ ID NO: 6418 - RNA, 19 nt, Artificial Sequence
  Synthetic
ugaaggaccugcagaggca

SEQ ID NO: 6419 - RNA, 19 nt, Artificial Sequence
  Synthetic
agcacaggcugaaggagaa

SEQ ID NO: 6420 - RNA, 19 nt, Artificial Sequence
  Synthetic
ccgagagcauccugaccua

SEQ ID NO: 6421 - RNA, 19 nt, Artificial Sequence
  Synthetic
ccggcaugguccagacgaa

SEQ ID NO: 6422 - RNA, 19 nt, Artificial Sequence
  Synthetic
gagcagugguggagcaaua

SEQ ID NO: 6423 - RNA, 19 nt, Artificial Sequence
  Synthetic
aaagaaagacagagacaaa

SEQ ID NO: 6424 - RNA, 19 nt, Artificial Sequence
  Synthetic
ggacaaugcuauauaaaga

SEQ ID NO: 6425 - RNA, 19 nt, Artificial Sequence
  Synthetic
gguaaagacuuccggacaa

SEQ ID NO: 6426 - RNA, 19 nt, Artificial Sequence
  Synthetic
ccucauuauucuuaggaaa

SEQ ID NO: 6427 - RNA, 19 nt, Artificial Sequence
  Synthetic
ggagaugauuucagaggaa

SEQ ID NO: 6428 - RNA, 19 nt, Artificial Sequence
  Synthetic
caauggagcaggaaggaua

SEQ ID NO: 6429 - RNA, 19 nt, Artificial Sequence
  Synthetic
ccacaggaauaaaggauuu

SEQ ID NO: 6430 - RNA, 19 nt, Artificial Sequence
  Synthetic
caacaaaagucucagauua

SEQ ID NO: 6431 - RNA, 19 nt, Artificial Sequence
  Synthetic
ccuuagagagggauggaaa

SEQ ID NO: 6432 - RNA, 19 nt, Artificial Sequence
  Synthetic
ccauacaacuggaguaaaa

SEQ ID NO: 6433 - RNA, 19 nt, Artificial Sequence
  Synthetic
ccaaagagcugggaauuua

SEQ ID NO: 6434 - RNA, 19 nt, Artificial Sequence
  Synthetic
gaagagaacuuuacugaau

SEQ ID NO: 6435 - RNA, 19 nt, Artificial Sequence
  Synthetic
cuagauaucuugugcaaau

SEQ ID NO: 6436 - RNA, 19 nt, Artificial Sequence
  Synthetic
ggaaaucacuucuguggaa

SEQ ID NO: 6437 - RNA, 19 nt, Artificial Sequence
  Synthetic
ccaaagacucugacuauaa

SEQ ID NO: 6438 - RNA, 19 nt, Artificial Sequence
  Synthetic
ggaagaugguccugcaaca

SEQ ID NO: 6439 - RNA, 19 nt, Artificial Sequence
  Synthetic
ugaagaagcacaugaauuu

SEQ ID NO: 6440 - RNA, 19 nt, Artificial Sequence
  Synthetic
gaaaauacgugguugaaau

SEQ ID NO: 6441 - RNA, 19 nt, Artificial Sequence
  Synthetic
agacagagacaaacaaauu

SEQ ID NO: 6442 - RNA, 19 nt, Artificial Sequence
  Synthetic
gggaagacuuagccuuaaa

SEQ ID NO: 6443 - RNA, 19 nt, Artificial Sequence
  Synthetic
acaauagagucucaggaua

SEQ ID NO: 6444 - RNA, 19 nt, Artificial Sequence
  Synthetic
acacaaacauccuaccaua

SEQ ID NO: 6445 - RNA, 19 nt, Artificial Sequence
  Synthetic
gaguguaacuaguaacauu

SEQ ID NO: 6446 - RNA, 19 nt, Artificial Sequence
  Synthetic
cggaagaaccuauagccua

SEQ ID NO: 6447 - RNA, 19 nt, Artificial Sequence
  Synthetic
gaauugagcugcugugaca

SEQ ID NO: 6448 - RNA, 19 nt, Artificial Sequence
  Synthetic
acacaugguccgacagcaa

SEQ ID NO: 6449 - RNA, 19 nt, Artificial Sequence
  Synthetic
caacugauguggaugaaga

SEQ ID NO: 6450 - RNA, 19 nt, Artificial Sequence
  Synthetic
ucaaaugucucuauggauu

SEQ ID NO: 6451 - RNA, 19 nt, Artificial Sequence
  Synthetic
ugaaggaaccugggaaaua

SEQ ID NO: 6452 - RNA, 19 nt, Artificial Sequence
  Synthetic
ggaaaugugucuugauaau

SEQ ID NO: 6453 - RNA, 19 nt, Artificial Sequence
  Synthetic
aagacaagacaaagagaaa

SEQ ID NO: 6454 - RNA, 19 nt, Artificial Sequence
  Synthetic
guaaacaagcugaacauaa

SEQ ID NO: 6455 - RNA, 19 nt, Artificial Sequence
  Synthetic
agagagggauauauggaaa

SEQ ID NO: 6456 - RNA, 19 nt, Artificial Sequence
  Synthetic
caaagugaauucauggaaa

SEQ ID NO: 6457 - RNA, 19 nt, Artificial Sequence
  Synthetic
gcaauuaaucagaagaaga

SEQ ID NO: 6458 - RNA, 19 nt, Artificial Sequence
  Synthetic
gcugagggauguuuagaaa

SEQ ID NO: 6459 - RNA, 19 nt, Artificial Sequence
  Synthetic
uggcauggauuguggaaga

SEQ ID NO: 6460 - RNA, 19 nt, Artificial Sequence
  Synthetic
cauaggacuucaagagaga

SEQ ID NO: 6461 - RNA, 19 nt, Artificial Sequence
  Synthetic
gcugaaagaagaaggaguu

SEQ ID NO: 6462 - RNA, 19 nt, Artificial Sequence
  Synthetic
gugcuauacuggccggaaa

SEQ ID NO: 6463 - RNA, 19 nt, Artificial Sequence
  Synthetic
cagcacuguccgaggcaaa

SEQ ID NO: 6464 - RNA, 19 nt, Artificial Sequence
  Synthetic
gagcaaagaaggauuuuau

SEQ ID NO: 6465 - RNA, 19 nt, Artificial Sequence
  Synthetic
gcaccuacauuaaugcuaa

SEQ ID NO: 6466 - RNA, 19 nt, Artificial Sequence
  Synthetic
ggauguagaagaagacaga

SEQ ID NO: 6467 - RNA, 19 nt, Artificial Sequence
  Synthetic
ccuuaagacaagacaaaga

SEQ ID NO: 6468 - RNA, 19 nt, Artificial Sequence
  Synthetic
cugcauaggagacuaaaua

SEQ ID NO: 6469 - RNA, 19 nt, Artificial Sequence
  Synthetic
gguuaucaguguaaaugaa

SEQ ID NO: 6470 - RNA, 19 nt, Artificial Sequence
  Synthetic
gcugaagacauucguauua

SEQ ID NO: 6471 - RNA, 19 nt, Artificial Sequence
  Synthetic
aggaguggcugcagcuuua

SEQ ID NO: 6472 - RNA, 19 nt, Artificial Sequence
  Synthetic
cccaacaugugaagcauua

SEQ ID NO: 6473 - RNA, 19 nt, Artificial Sequence
  Synthetic
gcacuacacugaauggaau

SEQ ID NO: 6474 - RNA, 19 nt, Artificial Sequence
  Synthetic
uggaaauaccaaugaacuu

SEQ ID NO: 6475 - RNA, 19 nt, Artificial Sequence
  Synthetic
ccucauggccugaucacaa

SEQ ID NO: 6476 - RNA, 19 nt, Artificial Sequence
  Synthetic
cuacaguggcaaggagaaa

SEQ ID NO: 6477 - RNA, 19 nt, Artificial Sequence
  Synthetic
cugcuaaaguugcaaguga

SEQ ID NO: 6478 - RNA, 19 nt, Artificial Sequence
  Synthetic
ggaaagaagaacaguauug

SEQ ID NO: 6479 - RNA, 19 nt, Artificial Sequence
  Synthetic
ucacaagacuccagacagu

SEQ ID NO: 6480 - RNA, 19 nt, Artificial Sequence
  Synthetic
agaagaggguccaacguau

SEQ ID NO: 6481 - RNA, 19 nt, Artificial Sequence
  Synthetic
gcaauggaaggaaggagaa

SEQ ID NO: 6482 - RNA, 19 nt, Artificial Sequence
  Synthetic
agaacaaacccgacaguaa

SEQ ID NO: 6483 - RNA, 19 nt, Artificial Sequence
  Synthetic
ccaaaugccuccugaacaa

SEQ ID NO: 6484 - RNA, 19 nt, Artificial Sequence
  Synthetic
gauugaaagcagugaggaa

SEQ ID NO: 6485 - RNA, 19 nt, Artificial Sequence
  Synthetic
ccaaggacccuguggaaau

SEQ ID NO: 6486 - RNA, 19 nt, Artificial Sequence
  Synthetic
ccuacaagauccaguacaa

SEQ ID NO: 6487 - RNA, 19 nt, Artificial Sequence
  Synthetic
gaacaaacccgacaguaaa

SEQ ID NO: 6488 - RNA, 19 nt, Artificial Sequence
  Synthetic
aagaauggcuccagugaga

SEQ ID NO: 6489 - RNA, 19 nt, Artificial Sequence
  Synthetic
cggaacagggugugccaaa

SEQ ID NO: 6490 - RNA, 19 nt, Artificial Sequence
  Synthetic
gaggagaagucacggauca

SEQ ID NO: 6491 - RNA, 19 nt, Artificial Sequence
  Synthetic
ucaaagaacccaaggacca

SEQ ID NO: 6492 - RNA, 19 nt, Artificial Sequence
  Synthetic
agacagaggaugaguacca

SEQ ID NO: 6493 - RNA, 19 nt, Artificial Sequence
  Synthetic
cccaagaacuucaagguga

SEQ ID NO: 6494 - RNA, 19 nt, Artificial Sequence
  Synthetic
gccaagugcauaagacuaa

SEQ ID NO: 6495 - RNA, 19 nt, Artificial Sequence
  Synthetic
ggacauucucucugcacaa

SEQ ID NO: 6496 - RNA, 19 nt, Artificial Sequence
  Synthetic
gaauggcuccagugagaaa

SEQ ID NO: 6497 - RNA, 19 nt, Artificial Sequence
  Synthetic
gcaacuggcagaagcacaa

SEQ ID NO: 6498 - RNA, 19 nt, Artificial Sequence
  Synthetic
cggccauggugcagacaga

SEQ ID NO: 6499 - RNA, 19 nt, Artificial Sequence
  Synthetic
aggaaaccgaccagggcaa

SEQ ID NO: 6500 - RNA, 19 nt, Artificial Sequence
  Synthetic
gcaagaaggucaacucuca

SEQ ID NO: 6501 - RNA, 19 nt, Artificial Sequence
  Synthetic
ccuggaacaagaagggcaa

SEQ ID NO: 6502 - RNA, 19 nt, Artificial Sequence
  Synthetic
cgagugaccuggaacaaga

SEQ ID NO: 6503 - RNA, 19 nt, Artificial Sequence
  Synthetic
gcaucgugcuggagcggau

SEQ ID NO: 6504 - RNA, 19 nt, Artificial Sequence
  Synthetic
ggaucaagccagagaagac

SEQ ID NO: 6505 - RNA, 19 nt, Artificial Sequence
  Synthetic
ugacgcggcuggaggagaa

SEQ ID NO: 6506 - RNA, 19 nt, Artificial Sequence
  Synthetic
cggaugacacggccgaaua

SEQ ID NO: 6507 - RNA, 19 nt, Artificial Sequence
  Synthetic
augaaggucuccuggauuu

SEQ ID NO: 6508 - RNA, 19 nt, Artificial Sequence
  Synthetic
cgaagaaccgcuaugccaa

SEQ ID NO: 6509 - RNA, 19 nt, Artificial Sequence
  Synthetic
aagaagggcaagaagguca

SEQ ID NO: 6510 - RNA, 19 nt, Artificial Sequence
  Synthetic
augaaggcgugguggacau

SEQ ID NO: 6511 - RNA, 19 nt, Artificial Sequence
  Synthetic
cagcaauggacgcaucaaa

SEQ ID NO: 6512 - RNA, 19 nt, Artificial Sequence
  Synthetic
ggauaaagcucaaagcaaa

SEQ ID NO: 6513 - RNA, 19 nt, Artificial Sequence
  Synthetic
gcgcagaauuucagauaua

SEQ ID NO: 6514 - RNA, 19 nt, Artificial Sequence
  Synthetic
aggaagaaauugaggcuua

SEQ ID NO: 6515 - RNA, 19 nt, Artificial Sequence
  Synthetic
ccagagacauugaaggaaa

SEQ ID NO: 6516 - RNA, 19 nt, Artificial Sequence
  Synthetic
acaauuaauuccuggguaa

SEQ ID NO: 6517 - RNA, 19 nt, Artificial Sequence
  Synthetic
gcacguaugagaagagaaa

SEQ ID NO: 6518 - RNA, 19 nt, Artificial Sequence
  Synthetic
ccauggagcuuuagagaga

SEQ ID NO: 6519 - RNA, 19 nt, Artificial Sequence
  Synthetic
cagagaagcagguggacaa

SEQ ID NO: 6520 - RNA, 19 nt, Artificial Sequence
  Synthetic
ccaacuacauugacggaua

SEQ ID NO: 6521 - RNA, 19 nt, Artificial Sequence
  Synthetic
cagacaaacuccagccaaa

SEQ ID NO: 6522 - RNA, 19 nt, Artificial Sequence
  Synthetic
gggugaaaugugugcgaua

SEQ ID NO: 6523 - RNA, 19 nt, Artificial Sequence
  Synthetic
cuaaauagcuucaggaugu

SEQ ID NO: 6524 - RNA, 19 nt, Artificial Sequence
  Synthetic
ucacaaaccugguggaagu

SEQ ID NO: 6525 - RNA, 19 nt, Artificial Sequence
  Synthetic
gcaaacaacaguaagcuua

SEQ ID NO: 6526 - RNA, 19 nt, Artificial Sequence
  Synthetic
ggagaaagggucauaggaa

SEQ ID NO: 6527 - RNA, 19 nt, Artificial Sequence
  Synthetic
ggaagugccucaaagcaaa

SEQ ID NO: 6528 - RNA, 19 nt, Artificial Sequence
  Synthetic
guuauaggcucaagaucaa

SEQ ID NO: 6529 - RNA, 19 nt, Artificial Sequence
  Synthetic
gccaagaagcagaaggaga

SEQ ID NO: 6530 - RNA, 19 nt, Artificial Sequence
  Synthetic
ggaagagacaaacaagaua

SEQ ID NO: 6531 - RNA, 19 nt, Artificial Sequence
  Synthetic
guauguaccucuaagacaa

SEQ ID NO: 6532 - RNA, 19 nt, Artificial Sequence
  Synthetic
gaagagacaaacaagauaa

SEQ ID NO: 6533 - RNA, 19 nt, Artificial Sequence
  Synthetic
gaagagacaagcugagauu

SEQ ID NO: 6534 - RNA, 19 nt, Artificial Sequence
  Synthetic
gcaaggaaguaaugagaag

SEQ ID NO: 6535 - RNA, 19 nt, Artificial Sequence
  Synthetic
acacggaggucuacggaga

SEQ ID NO: 6536 - RNA, 19 nt, Artificial Sequence
  Synthetic
caugauaagaaucgaagua

SEQ ID NO: 6537 - RNA, 19 nt, Artificial Sequence
  Synthetic
gugcauugcuggugggaag

SEQ ID NO: 6538 - RNA, 19 nt, Artificial Sequence
  Synthetic
gagcaggacucuuggaugu

SEQ ID NO: 6539 - RNA, 19 nt, Artificial Sequence
  Synthetic
cagccaaaucaaagaugaa

SEQ ID NO: 6540 - RNA, 19 nt, Artificial Sequence
  Synthetic
caucaaaaggagaagaaau

SEQ ID NO: 6541 - RNA, 19 nt, Artificial Sequence
  Synthetic
gggcugaccuguaggaugu

SEQ ID NO: 6542 - RNA, 19 nt, Artificial Sequence
  Synthetic
cuacauagauauucggaua

SEQ ID NO: 6543 - RNA, 19 nt, Artificial Sequence
  Synthetic
ccacaaagaagaaagacaa

SEQ ID NO: 6544 - RNA, 19 nt, Artificial Sequence
  Synthetic
ccaacuacauagaugguua

SEQ ID NO: 6545 - RNA, 19 nt, Artificial Sequence
  Synthetic
gcauugauccucagaguaa

SEQ ID NO: 6546 - RNA, 19 nt, Artificial Sequence
  Synthetic
agaagaaagacaaggucaa

SEQ ID NO: 6547 - RNA, 19 nt, Artificial Sequence
  Synthetic
ugaagacggccgaggguua

SEQ ID NO: 6548 - RNA, 19 nt, Artificial Sequence
  Synthetic
agauaugacuacugaccua

SEQ ID NO: 6549 - RNA, 19 nt, Artificial Sequence
  Synthetic
gcauguggguagaggaugu

SEQ ID NO: 6550 - RNA, 19 nt, Artificial Sequence
  Synthetic
ggucauacccucuggaguu

SEQ ID NO: 6551 - RNA, 19 nt, Artificial Sequence
  Synthetic
ggacuuggcauuuaggauu

SEQ ID NO: 6552 - RNA, 19 nt, Artificial Sequence
  Synthetic
ucauggagguggaguuuau

SEQ ID NO: 6553 - RNA, 19 nt, Artificial Sequence
  Synthetic
ccaaggaggagcuuagcaa

SEQ ID NO: 6554 - RNA, 19 nt, Artificial Sequence
  Synthetic
gcaaagagggcaaggaggu

SEQ ID NO: 6555 - RNA, 19 nt, Artificial Sequence
  Synthetic
gcaaagggagagaccacua

SEQ ID NO: 6556 - RNA, 19 nt, Artificial Sequence
  Synthetic
gagaagacacacaugauga

SEQ ID NO: 6557 - RNA, 19 nt, Artificial Sequence
  Synthetic
gagagugugugaagacaga

SEQ ID NO: 6558 - RNA, 19 nt, Artificial Sequence
  Synthetic
gccacaaagaagaaagaca

SEQ ID NO: 6559 - RNA, 19 nt, Artificial Sequence
  Synthetic
gcaaagggaagccggugaa

SEQ ID NO: 6560 - RNA, 19 nt, Artificial Sequence
  Synthetic
gggcagugcuguguggaau

SEQ ID NO: 6561 - RNA, 19 nt, Artificial Sequence
  Synthetic
ucaagaaccugcugcccua

SEQ ID NO: 6562 - RNA, 19 nt, Artificial Sequence
  Synthetic
cauuaaugccaacuacaua

SEQ ID NO: 6563 - RNA, 19 nt, Artificial Sequence
  Synthetic
ccgucagccugcagaccua

SEQ ID NO: 6564 - RNA, 19 nt, Artificial Sequence
  Synthetic
gggaaggucucuuuaaaau

SEQ ID NO: 6565 - RNA, 19 nt, Artificial Sequence
  Synthetic
gugagggcgucguggacau

SEQ ID NO: 6566 - RNA, 19 nt, Artificial Sequence
  Synthetic
ccaaaugcgcagagcccau

SEQ ID NO: 6567 - RNA, 19 nt, Artificial Sequence
  Synthetic
ugggcgacguggaggucaa

SEQ ID NO: 6568 - RNA, 19 nt, Artificial Sequence
  Synthetic
aaagcugccugcaaggaaa

SEQ ID NO: 6569 - RNA, 19 nt, Artificial Sequence
  Synthetic
gcuauaucguccuggaugu

SEQ ID NO: 6570 - RNA, 19 nt, Artificial Sequence
  Synthetic
aagaagaaagacaagguca

SEQ ID NO: 6571 - RNA, 19 nt, Artificial Sequence
  Synthetic
agugggagcaagugcgaau

SEQ ID NO: 6572 - RNA, 19 nt, Artificial Sequence
  Synthetic
aaacaaagcuagagaaaca

SEQ ID NO: 6573 - RNA, 19 nt, Artificial Sequence
  Synthetic
gcacaagaaucgauacaua

SEQ ID NO: 6574 - RNA, 19 nt, Artificial Sequence
  Synthetic
uaacaaaccucguggagaa

SEQ ID NO: 6575 - RNA, 19 nt, Artificial Sequence
  Synthetic
aggaggaggaagagggaaa

SEQ ID NO: 6576 - RNA, 19 nt, Artificial Sequence
  Synthetic
gaacauaucccaaggguau

SEQ ID NO: 6577 - RNA, 19 nt, Artificial Sequence
  Synthetic
aaacaauuuucgagagcaa

SEQ ID NO: 6578 - RNA, 19 nt, Artificial Sequence
  Synthetic
aagcaaugcaacagggaaa

SEQ ID NO: 6579 - RNA, 19 nt, Artificial Sequence
  Synthetic
cagcauugccugauggaaa

SEQ ID NO: 6580 - RNA, 19 nt, Artificial Sequence
  Synthetic
gcacaaggcaggaagagaa

SEQ ID NO: 6581 - RNA, 19 nt, Artificial Sequence
  Synthetic
guuuaaagcaagcaagaua

SEQ ID NO: 6582 - RNA, 19 nt, Artificial Sequence
  Synthetic
gggaaaagacauugaagaa

SEQ ID NO: 6583 - RNA, 19 nt, Artificial Sequence
  Synthetic
ccaauuauguugauggcua

SEQ ID NO: 6584 - RNA, 19 nt, Artificial Sequence
  Synthetic
gguuggaauccgagaagaa

SEQ ID NO: 6585 - RNA, 19 nt, Artificial Sequence
  Synthetic
ggaaaacaguggaaauuaa

SEQ ID NO: 6586 - RNA, 19 nt, Artificial Sequence
  Synthetic
ggaaagaccucgagucguu

SEQ ID NO: 6587 - RNA, 19 nt, Artificial Sequence
  Synthetic
gggcaagguaccucagaua

SEQ ID NO: 6588 - RNA, 19 nt, Artificial Sequence
  Synthetic
agaaaguggaucagggcaa

SEQ ID NO: 6589 - RNA, 19 nt, Artificial Sequence
  Synthetic
aggcugacccagagaauua

SEQ ID NO: 6590 - RNA, 19 nt, Artificial Sequence
  Synthetic
cgaaauacaaugaagccaa

SEQ ID NO: 6591 - RNA, 19 nt, Artificial Sequence
  Synthetic
cgaaggaacugucaacaua

SEQ ID NO: 6592 - RNA, 19 nt, Artificial Sequence
  Synthetic
cgacaugccuacugauaau

SEQ ID NO: 6593 - RNA, 19 nt, Artificial Sequence
  Synthetic
acaaugaagccaagacuaa

SEQ ID NO: 6594 - RNA, 19 nt, Artificial Sequence
  Synthetic
gaguuauguucuucagaua

SEQ ID NO: 6595 - RNA, 19 nt, Artificial Sequence
  Synthetic
aggaaaagguaaugaauga

SEQ ID NO: 6596 - RNA, 19 nt, Artificial Sequence
  Synthetic
aggaagcagucaaaggaaa

SEQ ID NO: 6597 - RNA, 19 nt, Artificial Sequence
  Synthetic
gagcuguacuguugacuua

SEQ ID NO: 6598 - RNA, 19 nt, Artificial Sequence
  Synthetic
ggaaagaaauauccaacau

SEQ ID NO: 6599 - RNA, 19 nt, Artificial Sequence
  Synthetic
agaaauaacuccuggauuc

SEQ ID NO: 6600 - RNA, 19 nt, Artificial Sequence
  Synthetic
ccuaagucuucguuaauaa

SEQ ID NO: 6601 - RNA, 19 nt, Artificial Sequence
  Synthetic
gagaaaggaaggagaaaau

SEQ ID NO: 6602 - RNA, 19 nt, Artificial Sequence
  Synthetic
gaaagaacucugagaauua

SEQ ID NO: 6603 - RNA, 19 nt, Artificial Sequence
  Synthetic
cuaaagagccuaaagguua

SEQ ID NO: 6604 - RNA, 19 nt, Artificial Sequence
  Synthetic
guguauagaacgagaaauu

SEQ ID NO: 6605 - RNA, 19 nt, Artificial Sequence
  Synthetic
ucaaaugaguuacgugaaa

SEQ ID NO: 6606 - RNA, 19 nt, Artificial Sequence
  Synthetic
gaaagcuacuugaaggaaa

SEQ ID NO: 6607 - RNA, 19 nt, Artificial Sequence
  Synthetic
cugaauaucugacgggauu

SEQ ID NO: 6608 - RNA, 19 nt, Artificial Sequence
  Synthetic
gccugugacuugaggguua

SEQ ID NO: 6609 - RNA, 19 nt, Artificial Sequence
  Synthetic
ggaacuaaauaucaaggaa

SEQ ID NO: 6610 - RNA, 19 nt, Artificial Sequence
  Synthetic
aagguaaugucauggaaua

SEQ ID NO: 6611 - RNA, 19 nt, Artificial Sequence
  Synthetic
auacaaaguaagcuggaaa

SEQ ID NO: 6612 - RNA, 19 nt, Artificial Sequence
  Synthetic
gagacagagaacagacaaa

SEQ ID NO: 6613 - RNA, 19 nt, Artificial Sequence
  Synthetic
ggaagguguuacuguuaaa

SEQ ID NO: 6614 - RNA, 19 nt, Artificial Sequence
  Synthetic
cguuggagauugugauuuu

SEQ ID NO: 6615 - RNA, 19 nt, Artificial Sequence
  Synthetic
cuaauugguuugugaaaga

SEQ ID NO: 6616 - RNA, 19 nt, Artificial Sequence
  Synthetic
gcauaucuguguaaguaua

SEQ ID NO: 6617 - RNA, 19 nt, Artificial Sequence
  Synthetic
cagcuaacuucuuugauua

SEQ ID NO: 6618 - RNA, 19 nt, Artificial Sequence
  Synthetic
cgagaugauuauugacaga

SEQ ID NO: 6619 - RNA, 19 nt, Artificial Sequence
  Synthetic
ggacauuccuuuuccaauu

SEQ ID NO: 6620 - RNA, 19 nt, Artificial Sequence
  Synthetic
uaaagagccuaaagguuaa

SEQ ID NO: 6621 - RNA, 19 nt, Artificial Sequence
  Synthetic
uaggagagguacagcagaa

SEQ ID NO: 6622 - RNA, 19 nt, Artificial Sequence
  Synthetic
cauaauaccaucugcagua

SEQ ID NO: 6623 - RNA, 19 nt, Artificial Sequence
  Synthetic
ucaaggaaaucaagacauu

SEQ ID NO: 6624 - RNA, 19 nt, Artificial Sequence
  Synthetic
caaaagagcugaaacagua

SEQ ID NO: 6625 - RNA, 19 nt, Artificial Sequence
  Synthetic
ccuaaagagccuaaagguu

SEQ ID NO: 6626 - RNA, 19 nt, Artificial Sequence
  Synthetic
gaggauggaaagaaggaau

SEQ ID NO: 6627 - RNA, 19 nt, Artificial Sequence
  Synthetic
agguguaacucaaguaaca

SEQ ID NO: 6628 - RNA, 19 nt, Artificial Sequence
  Synthetic
uguuggagguuaugaaaga

SEQ ID NO: 6629 - RNA, 19 nt, Artificial Sequence
  Synthetic
ggucugaauuguauaugua

SEQ ID NO: 6630 - RNA, 19 nt, Artificial Sequence
  Synthetic
aaugggaggagaaggguua

SEQ ID NO: 6631 - RNA, 19 nt, Artificial Sequence
  Synthetic
ggacauggugagugcccua

SEQ ID NO: 6632 - RNA, 19 nt, Artificial Sequence
  Synthetic
gcguggagacagaaggaaa

SEQ ID NO: 6633 - RNA, 19 nt, Artificial Sequence
  Synthetic
gaacagaaagcuuguauau

SEQ ID NO: 6634 - RNA, 19 nt, Artificial Sequence
  Synthetic
cagcaggaccuaaggaaaa

SEQ ID NO: 6635 - RNA, 19 nt, Artificial Sequence
  Synthetic
ggauuuugcaugacaggaa

SEQ ID NO: 6636 - RNA, 19 nt, Artificial Sequence
  Synthetic
cagaaagcuuguauaugaa

SEQ ID NO: 6637 - RNA, 19 nt, Artificial Sequence
  Synthetic
aagcaaaaguucagacuca

SEQ ID NO: 6638 - RNA, 19 nt, Artificial Sequence
  Synthetic
agacagaaggaaaugguga

SEQ ID NO: 6639 - RNA, 19 nt, Artificial Sequence
  Synthetic
ggacaacagugcaucuuau

SEQ ID NO: 6640 - RNA, 19 nt, Artificial Sequence
  Synthetic
ugacuauggauuaaggaau

SEQ ID NO: 6641 - RNA, 19 nt, Artificial Sequence
  Synthetic
cguggagacagaaggaaau

SEQ ID NO: 6642 - RNA, 19 nt, Artificial Sequence
  Synthetic
auguaaaugcccugacgaa

SEQ ID NO: 6643 - RNA, 19 nt, Artificial Sequence
  Synthetic
uaaccaaggagaaguaaaa

SEQ ID NO: 6644 - RNA, 19 nt, Artificial Sequence
  Synthetic
agaagaaacuugagaggaa

SEQ ID NO: 6645 - RNA, 19 nt, Artificial Sequence
  Synthetic
ccugaggaguugaggguua

SEQ ID NO: 6646 - RNA, 19 nt, Artificial Sequence
  Synthetic
uugaagaacuugugguuaa

SEQ ID NO: 6647 - RNA, 19 nt, Artificial Sequence
  Synthetic
acacaggagugauggauaa

SEQ ID NO: 6648 - RNA, 19 nt, Artificial Sequence
  Synthetic
ggacaugucuucagauaau

SEQ ID NO: 6649 - RNA, 19 nt, Artificial Sequence
  Synthetic
ggacagaagugaaaaggaa

SEQ ID NO: 6650 - RNA, 19 nt, Artificial Sequence
  Synthetic
gaaugaaguuugagaaugu

SEQ ID NO: 6651 - RNA, 19 nt, Artificial Sequence
  Synthetic
guaaagagaaggagaaguu

SEQ ID NO: 6652 - RNA, 19 nt, Artificial Sequence
  Synthetic
cugaagaccuuuacgcaua

SEQ ID NO: 6653 - RNA, 19 nt, Artificial Sequence
  Synthetic
ccaauuauguggagacuga

SEQ ID NO: 6654 - RNA, 19 nt, Artificial Sequence
  Synthetic
ggauauaaccugaaccuuu

SEQ ID NO: 6655 - RNA, 19 nt, Artificial Sequence
  Synthetic
gcaggaagagagaagauua

SEQ ID NO: 6656 - RNA, 19 nt, Artificial Sequence
  Synthetic
gauguggacuuuuggauua

SEQ ID NO: 6657 - RNA, 19 nt, Artificial Sequence
  Synthetic
ggagauuacuugaagaguu

SEQ ID NO: 6658 - RNA, 19 nt, Artificial Sequence
  Synthetic
gcacuuugcuuauuugaaa

SEQ ID NO: 6659 - RNA, 19 nt, Artificial Sequence
  Synthetic
caaagaagcgaguggcuau

SEQ ID NO: 6660 - RNA, 19 nt, Artificial Sequence
  Synthetic
cauauuggcuacuggaaau

SEQ ID NO: 6661 - RNA, 19 nt, Artificial Sequence
  Synthetic
caugaggucuguaaaguua

SEQ ID NO: 6662 - RNA, 19 nt, Artificial Sequence
  Synthetic
uagcaggaguuaugaaaga

SEQ ID NO: 6663 - RNA, 19 nt, Artificial Sequence
  Synthetic
gaacaugaagcuuugcaua

SEQ ID NO: 6664 - RNA, 19 nt, Artificial Sequence
  Synthetic
auggaaauguugccaauua

SEQ ID NO: 6665 - RNA, 19 nt, Artificial Sequence
  Synthetic
gauauuaccucaaccgauu

SEQ ID NO: 6666 - RNA, 19 nt, Artificial Sequence
  Synthetic
ucucuuagcagcacagaua

SEQ ID NO: 6667 - RNA, 19 nt, Artificial Sequence
  Synthetic
cugaguagcuuauacacua

SEQ ID NO: 6668 - RNA, 19 nt, Artificial Sequence
  Synthetic
cagguuggguaucgauaua

SEQ ID NO: 6669 - RNA, 19 nt, Artificial Sequence
  Synthetic
gcaguaaaccucacgaaga

SEQ ID NO: 6670 - RNA, 19 nt, Artificial Sequence
  Synthetic
gguaauauguaagcaggaa

SEQ ID NO: 6671 - RNA, 19 nt, Artificial Sequence
  Synthetic
gaccaaauccaauguaaau

SEQ ID NO: 6672 - RNA, 19 nt, Artificial Sequence
  Synthetic
gcuaggaaacuuuaccaaa

SEQ ID NO: 6673 - RNA, 19 nt, Artificial Sequence
  Synthetic
gcagcuagcuaacucauua

SEQ ID NO: 6674 - RNA, 19 nt, Artificial Sequence
  Synthetic
cagagaagaccgugaagaa

SEQ ID NO: 6675 - RNA, 19 nt, Artificial Sequence
  Synthetic
ucugaaagaugcaggagaa

SEQ ID NO: 6676 - RNA, 19 nt, Artificial Sequence
  Synthetic
ggaagagagacaagaauga

SEQ ID NO: 6677 - RNA, 19 nt, Artificial Sequence
  Synthetic
gauuaaagcauucguggaa

SEQ ID NO: 6678 - RNA, 19 nt, Artificial Sequence
  Synthetic
gugaagaagauuaaagcau

SEQ ID NO: 6679 - RNA, 19 nt, Artificial Sequence
  Synthetic
gagaagaccgugaagaaga

SEQ ID NO: 6680 - RNA, 19 nt, Artificial Sequence
  Synthetic
ggaaagaaaguguauguca

SEQ ID NO: 6681 - RNA, 19 nt, Artificial Sequence
  Synthetic
gggacaaaucggugaccau

SEQ ID NO: 6682 - RNA, 19 nt, Artificial Sequence
  Synthetic
ggucaaagcauucgccaca

SEQ ID NO: 6683 - RNA, 19 nt, Artificial Sequence
  Synthetic
gaaugacgcugaugaguga

SEQ ID NO: 6684 - RNA, 19 nt, Artificial Sequence
  Synthetic
gagcaaagccccacaguuu

SEQ ID NO: 6685 - RNA, 19 nt, Artificial Sequence
  Synthetic
ucgagaaaggagaggcauu

SEQ ID NO: 6686 - RNA, 19 nt, Artificial Sequence
  Synthetic
aagaagaucucccgggaca

SEQ ID NO: 6687 - RNA, 19 nt, Artificial Sequence
  Synthetic
cuggcuaacaaucgagaaa

SEQ ID NO: 6688 - RNA, 19 nt, Artificial Sequence
  Synthetic
ugggaauccuggugucuua

SEQ ID NO: 6689 - RNA, 19 nt, Artificial Sequence
  Synthetic
cugaucuugugaagggaaa

SEQ ID NO: 6690 - RNA, 19 nt, Artificial Sequence
  Synthetic
uuaaagcauucguggaaca

SEQ ID NO: 6691 - RNA, 19 nt, Artificial Sequence
  Synthetic
guuuaguccuuuggaguua

SEQ ID NO: 6692 - RNA, 19 nt, Artificial Sequence
  Synthetic
ggaacagagacuacauaga

SEQ ID NO: 6693 - RNA, 19 nt, Artificial Sequence
  Synthetic
agaccgugaagaagauuaa

SEQ ID NO: 6694 - RNA, 19 nt, Artificial Sequence
  Synthetic
guucucuacucgagugauu

SEQ ID NO: 6695 - RNA, 19 nt, Artificial Sequence
  Synthetic
gaagaagauuaaagcauuc

SEQ ID NO: 6696 - RNA, 19 nt, Artificial Sequence
  Synthetic
agaagagcuccgugcgauu

SEQ ID NO: 6697 - RNA, 19 nt, Artificial Sequence
  Synthetic
ugucaggcuuucugggaga

SEQ ID NO: 6698 - RNA, 19 nt, Artificial Sequence
  Synthetic
gaaagaugcaggagaagcu

SEQ ID NO: 6699 - RNA, 19 nt, Artificial Sequence
  Synthetic
gaggaggggaagagagaca

SEQ ID NO: 6700 - RNA, 19 nt, Artificial Sequence
  Synthetic
gcucacagugucaggcuuu

SEQ ID NO: 6701 - RNA, 19 nt, Artificial Sequence
  Synthetic
ggaguuugcucgccauaau

SEQ ID NO: 6702 - RNA, 19 nt, Artificial Sequence
  Synthetic
uaacaaucgagaaaggaga

SEQ ID NO: 6703 - RNA, 19 nt, Artificial Sequence
  Synthetic
ucguggaacagguggccaa

SEQ ID NO: 6704 - RNA, 19 nt, Artificial Sequence
  Synthetic
ggaaaaugcuugaggccaa

SEQ ID NO: 6705 - RNA, 19 nt, Artificial Sequence
  Synthetic
ccacagagagggaggaaga

SEQ ID NO: 6706 - RNA, 19 nt, Artificial Sequence
  Synthetic
gggacaaagcccagcucaa

SEQ ID NO: 6707 - RNA, 19 nt, Artificial Sequence
  Synthetic
gcaguguggccgagagcua

SEQ ID NO: 6708 - RNA, 19 nt, Artificial Sequence
  Synthetic
gcgccgagcucuuccguaa

SEQ ID NO: 6709 - RNA, 19 nt, Artificial Sequence
  Synthetic
cgaccagaguaguggcuca

SEQ ID NO: 6710 - RNA, 19 nt, Artificial Sequence
  Synthetic
ggcuggagguugugcgcaa

SEQ ID NO: 6711 - RNA, 19 nt, Artificial Sequence
  Synthetic
ugaaggugcuggagggcau

SEQ ID NO: 6712 - RNA, 19 nt, Artificial Sequence
  Synthetic
agaaggacugggaggacaa

SEQ ID NO: 6713 - RNA, 19 nt, Artificial Sequence
  Synthetic
agcaggagcuggugcagaa

SEQ ID NO: 6714 - RNA, 19 nt, Artificial Sequence
  Synthetic
gcugagcgcuggaaggaca

SEQ ID NO: 6715 - RNA, 19 nt, Artificial Sequence
  Synthetic
uggagaacgugauugggaa

SEQ ID NO: 6716 - RNA, 19 nt, Artificial Sequence
  Synthetic
gagaaggacugggaggaca

SEQ ID NO: 6717 - RNA, 19 nt, Artificial Sequence
  Synthetic
gcugaaagcauguguccca

SEQ ID NO: 6718 - RNA, 19 nt, Artificial Sequence
  Synthetic
ccuacguguuugaggggaa

SEQ ID NO: 6719 - RNA, 19 nt, Artificial Sequence
  Synthetic
cugcagagucagacgcaca

SEQ ID NO: 6720 - RNA, 19 nt, Artificial Sequence
  Synthetic
gcugguucgugcuggacaa

SEQ ID NO: 6721 - RNA, 19 nt, Artificial Sequence
  Synthetic
ugaccaaggagaagcgcau

SEQ ID NO: 6722 - RNA, 19 nt, Artificial Sequence
  Synthetic
ucgaugagcugguggccca

SEQ ID NO: 6723 - RNA, 19 nt, Artificial Sequence
  Synthetic
cuacggaccuguucgauga

SEQ ID NO: 6724 - RNA, 19 nt, Artificial Sequence
  Synthetic
ggaagaacggucugaugga

SEQ ID NO: 6725 - RNA, 19 nt, Artificial Sequence
  Synthetic
cuaagacuguggacgagaa

SEQ ID NO: 6726 - RNA, 19 nt, Artificial Sequence
  Synthetic
ugcagaggcuggagacaga

SEQ ID NO: 6727 - RNA, 19 nt, Artificial Sequence
  Synthetic
agaaguaccugcaggcugu

SEQ ID NO: 6728 - RNA, 19 nt, Artificial Sequence
  Synthetic
cugaggaccaggaggacga

SEQ ID NO: 6729 - RNA, 19 nt, Artificial Sequence
  Synthetic
gcucaagggugugcgguca

SEQ ID NO: 6730 - RNA, 19 nt, Artificial Sequence
  Synthetic
cagcagagagugagaacag

SEQ ID NO: 6731 - RNA, 19 nt, Artificial Sequence
  Synthetic
gucaagaacgccaagaaga

SEQ ID NO: 6732 - RNA, 19 nt, Artificial Sequence
  Synthetic
cuggaggccugcauggcaa

SEQ ID NO: 6733 - RNA, 19 nt, Artificial Sequence
  Synthetic
gcuggugcccauugaggua

SEQ ID NO: 6734 - RNA, 19 nt, Artificial Sequence
  Synthetic
gcacagaagugguaauaaa

SEQ ID NO: 6735 - RNA, 19 nt, Artificial Sequence
  Synthetic
cgaagaagaucgaaaauua

SEQ ID NO: 6736 - RNA, 19 nt, Artificial Sequence
  Synthetic
ggaagaacgugcacacaua

SEQ ID NO: 6737 - RNA, 19 nt, Artificial Sequence
  Synthetic
gugagaaggaugugaagaa

SEQ ID NO: 6738 - RNA, 19 nt, Artificial Sequence
  Synthetic
ugaaggaacucaaggaauu

SEQ ID NO: 6739 - RNA, 19 nt, Artificial Sequence
  Synthetic
uaaacaaagcgaagaggaa

SEQ ID NO: 6740 - RNA, 19 nt, Artificial Sequence
  Synthetic
cggagaaccuaaacaacaa

SEQ ID NO: 6741 - RNA, 19 nt, Artificial Sequence
  Synthetic
cuccaaaccaucagggaaa

SEQ ID NO: 6742 - RNA, 19 nt, Artificial Sequence
  Synthetic
agaaggaugugaagaagaa

SEQ ID NO: 6743 - RNA, 19 nt, Artificial Sequence
  Synthetic
ccaaagagcuagagcggcu

SEQ ID NO: 6744 - RNA, 19 nt, Artificial Sequence
  Synthetic
gcagcgaagaagaucgaaa

SEQ ID NO: 6745 - RNA, 19 nt, Artificial Sequence
  Synthetic
cggaagaccuguccaguga

SEQ ID NO: 6746 - RNA, 19 nt, Artificial Sequence
  Synthetic
gcaaacagcggcacaacaa

SEQ ID NO: 6747 - RNA, 19 nt, Artificial Sequence
  Synthetic
ggaaggaugcacauauuua

SEQ ID NO: 6748 - RNA, 19 nt, Artificial Sequence
  Synthetic
caaagagauucguaaugaa

SEQ ID NO: 6749 - RNA, 19 nt, Artificial Sequence
  Synthetic
gaggaggagaagaaacuaa

SEQ ID NO: 6750 - RNA, 19 nt, Artificial Sequence
  Synthetic
caagaagaaccauguuuua

SEQ ID NO: 6751 - RNA, 19 nt, Artificial Sequence
  Synthetic
ccacaagcaugcaggugau

SEQ ID NO: 6752 - RNA, 19 nt, Artificial Sequence
  Synthetic
gagaaggaugugaagaaga

SEQ ID NO: 6753 - RNA, 19 nt, Artificial Sequence
  Synthetic
ccaacggcauggaggauga

SEQ ID NO: 6754 - RNA, 19 nt, Artificial Sequence
  Synthetic
ccacuggaaugaagcguau

SEQ ID NO: 6755 - RNA, 19 nt, Artificial Sequence
  Synthetic
gagaagaaacuaaccaaca

SEQ ID NO: 6756 - RNA, 19 nt, Artificial Sequence
  Synthetic
cggaguuccagcagcgaua

SEQ ID NO: 6757 - RNA, 19 nt, Artificial Sequence
  Synthetic
gagccaggaucuagaaaau

SEQ ID NO: 6758 - RNA, 19 nt, Artificial Sequence
  Synthetic
cuaaacaacaacagcaaga

SEQ ID NO: 6759 - RNA, 19 nt, Artificial Sequence
  Synthetic
uaaccaacaugcagcacaa

SEQ ID NO: 6760 - RNA, 19 nt, Artificial Sequence
  Synthetic
aagcagaagcgcagcauca

SEQ ID NO: 6761 - RNA, 19 nt, Artificial Sequence
  Synthetic
gagaggaggagaagaaacu

SEQ ID NO: 6762 - RNA, 19 nt, Artificial Sequence
  Synthetic
ucagaugaguagucccaaa

SEQ ID NO: 6763 - RNA, 19 nt, Artificial Sequence
  Synthetic
gccaggacaccgaggagaa

SEQ ID NO: 6764 - RNA, 19 nt, Artificial Sequence
  Synthetic
gagcaaaggcaaagggaaa

SEQ ID NO: 6765 - RNA, 19 nt, Artificial Sequence
  Synthetic
ggguagaaaucauugaaua

SEQ ID NO: 6766 - RNA, 19 nt, Artificial Sequence
  Synthetic
gaaugucacucgagagaua

SEQ ID NO: 6767 - RNA, 19 nt, Artificial Sequence
  Synthetic
agaaaugagcaaaggcaaa

SEQ ID NO: 6768 - RNA, 19 nt, Artificial Sequence
  Synthetic
gaauauacccacauaguua

SEQ ID NO: 6769 - RNA, 19 nt, Artificial Sequence
  Synthetic
gaguuuacuucuagggaau

SEQ ID NO: 6770 - RNA, 19 nt, Artificial Sequence
  Synthetic
ugagaagagcggagagcaa

SEQ ID NO: 6771 - RNA, 19 nt, Artificial Sequence
  Synthetic
gaaagaaagacgaacggua

SEQ ID NO: 6772 - RNA, 19 nt, Artificial Sequence
  Synthetic
agaaggauuuggagaauau

SEQ ID NO: 6773 - RNA, 19 nt, Artificial Sequence
  Synthetic
aaagaaagacgaacgguaa

SEQ ID NO: 6774 - RNA, 19 nt, Artificial Sequence
  Synthetic
ggaaaguacuuaccagaau

SEQ ID NO: 6775 - RNA, 19 nt, Artificial Sequence
  Synthetic
ggaaagugaacauggaaaa

SEQ ID NO: 6776 - RNA, 19 nt, Artificial Sequence
  Synthetic
gaacucaacaagaaggaua

SEQ ID NO: 6777 - RNA, 19 nt, Artificial Sequence
  Synthetic
cuucaauggaugaggaaca

SEQ ID NO: 6778 - RNA, 19 nt, Artificial Sequence
  Synthetic
ggagacagaugcacugaaa

SEQ ID NO: 6779 - RNA, 19 nt, Artificial Sequence
  Synthetic
ggauagcccuacacagaua

SEQ ID NO: 6780 - RNA, 19 nt, Artificial Sequence
  Synthetic
uggaagauuuggagacaga

SEQ ID NO: 6781 - RNA, 19 nt, Artificial Sequence
  Synthetic
cgguauaucuugaauguca

SEQ ID NO: 6782 - RNA, 19 nt, Artificial Sequence
  Synthetic
gaacagaaaggcuaauuaa

SEQ ID NO: 6783 - RNA, 19 nt, Artificial Sequence
  Synthetic
gaacagaguuggaaaugca

SEQ ID NO: 6784 - RNA, 19 nt, Artificial Sequence
  Synthetic
ggcuagaacucaacaagaa

SEQ ID NO: 6785 - RNA, 19 nt, Artificial Sequence
  Synthetic
ggagaauauuacauccaaa

SEQ ID NO: 6786 - RNA, 19 nt, Artificial Sequence
  Synthetic
gaacgaacagaaaggcuaa

SEQ ID NO: 6787 - RNA, 19 nt, Artificial Sequence
  Synthetic
gaacgugaacgaacagaaa

SEQ ID NO: 6788 - RNA, 19 nt, Artificial Sequence
  Synthetic
ggucaaauggauagcccua

SEQ ID NO: 6789 - RNA, 19 nt, Artificial Sequence
  Synthetic
ggugaaggagcgugcuaaa

SEQ ID NO: 6790 - RNA, 19 nt, Artificial Sequence
  Synthetic
ccuaugcaaugaaggaaua

SEQ ID NO: 6791 - RNA, 19 nt, Artificial Sequence
  Synthetic
gcagaaggauuuggagaau

SEQ ID NO: 6792 - RNA, 19 nt, Artificial Sequence
  Synthetic
gagcaagggcugaggaaag

SEQ ID NO: 6793 - RNA, 19 nt, Artificial Sequence
  Synthetic
gcaguaugccaaagaauuu

SEQ ID NO: 6794 - RNA, 19 nt, Artificial Sequence
  Synthetic
ggacaaugaugaugcagua

SEQ ID NO: 6795 - RNA, 19 nt, Artificial Sequence
  Synthetic
uggaggagcugcagaggaa

SEQ ID NO: 6796 - RNA, 19 nt, Artificial Sequence
  Synthetic
aggagaagguuguaggcau

SEQ ID NO: 6797 - RNA, 19 nt, Artificial Sequence
  Synthetic
gggcaaagccggaucuuca

SEQ ID NO: 6798 - RNA, 19 nt, Artificial Sequence
  Synthetic
ccucagaacaggagcagau

SEQ ID NO: 6799 - RNA, 19 nt, Artificial Sequence
  Synthetic
gcaccaagcaugugaggca

SEQ ID NO: 6800 - RNA, 19 nt, Artificial Sequence
  Synthetic
cagcaaaccuggaggagcu

SEQ ID NO: 6801 - RNA, 19 nt, Artificial Sequence
  Synthetic
cugcagaggaacaggguca

SEQ ID NO: 6802 - RNA, 19 nt, Artificial Sequence
  Synthetic
uuucauagccuuacaguau

SEQ ID NO: 6803 - RNA, 19 nt, Artificial Sequence
  Synthetic
cccggaagguggugagaca

SEQ ID NO: 6804 - RNA, 19 nt, Artificial Sequence
  Synthetic
gggcaccaggccagagaua

SEQ ID NO: 6805 - RNA, 19 nt, Artificial Sequence
  Synthetic
ggagaagguuguaggcaug

SEQ ID NO: 6806 - RNA, 19 nt, Artificial Sequence
  Synthetic
gggccacacuccagguauu

SEQ ID NO: 6807 - RNA, 19 nt, Artificial Sequence
  Synthetic
ccagacagacuucgggcaa

SEQ ID NO: 6808 - RNA, 19 nt, Artificial Sequence
  Synthetic
cgugacgucuggugggcaa

SEQ ID NO: 6809 - RNA, 19 nt, Artificial Sequence
  Synthetic
ggcuuuguacugagaaaua

SEQ ID NO: 6810 - RNA, 19 nt, Artificial Sequence
  Synthetic
gaaagaagagccugggcca

SEQ ID NO: 6811 - RNA, 19 nt, Artificial Sequence
  Synthetic
agguguacuuagauggaga

SEQ ID NO: 6812 - RNA, 19 nt, Artificial Sequence
  Synthetic
gcaccaggccagagauagu

SEQ ID NO: 6813 - RNA, 19 nt, Artificial Sequence
  Synthetic
ccuuggagcuggagagcac

SEQ ID NO: 6814 - RNA, 19 nt, Artificial Sequence
  Synthetic
uguggaaaguguuggaugu

SEQ ID NO: 6815 - RNA, 19 nt, Artificial Sequence
  Synthetic
gugacaugccagaggucuu

SEQ ID NO: 6816 - RNA, 19 nt, Artificial Sequence
  Synthetic
gccaugaagcaguacgaau

SEQ ID NO: 6817 - RNA, 19 nt, Artificial Sequence
  Synthetic
ucagugaccuggagagugu

SEQ ID NO: 6818 - RNA, 19 nt, Artificial Sequence
  Synthetic
cccagaagcaggaggagca

SEQ ID NO: 6819 - RNA, 19 nt, Artificial Sequence
  Synthetic
uccaagggcucaagacuuu

SEQ ID NO: 6820 - RNA, 19 nt, Artificial Sequence
  Synthetic
cagaacaggagcagaugga

SEQ ID NO: 6821 - RNA, 19 nt, Artificial Sequence
  Synthetic
cuggagagcaccucagaga

SEQ ID NO: 6822 - RNA, 19 nt, Artificial Sequence
  Synthetic
ggaaggagacgcaccgcuu

SEQ ID NO: 6823 - RNA, 19 nt, Artificial Sequence
  Synthetic
gaggagcugcagaggaaca

SEQ ID NO: 6824 - RNA, 19 nt, Artificial Sequence
  Synthetic
gaagagaacacaugaagaa

SEQ ID NO: 6825 - RNA, 19 nt, Artificial Sequence
  Synthetic
guacgaggcuggaagaaau

SEQ ID NO: 6826 - RNA, 19 nt, Artificial Sequence
  Synthetic
gugggagaguggagauuaa

SEQ ID NO: 6827 - RNA, 19 nt, Artificial Sequence
  Synthetic
caucauagagugugaauuu

SEQ ID NO: 6828 - RNA, 19 nt, Artificial Sequence
  Synthetic
ggaaugaaguacagagaug

SEQ ID NO: 6829 - RNA, 19 nt, Artificial Sequence
  Synthetic
cuacagaaacauggaauaa

SEQ ID NO: 6830 - RNA, 19 nt, Artificial Sequence
  Synthetic
gacgagagaugcaggaaau

SEQ ID NO: 6831 - RNA, 19 nt, Artificial Sequence
  Synthetic
gugcuuaaacacaaggaua

SEQ ID NO: 6832 - RNA, 19 nt, Artificial Sequence
  Synthetic
ccucauggccucuaaauua

SEQ ID NO: 6833 - RNA, 19 nt, Artificial Sequence
  Synthetic
gcaacaucauagaguguga

SEQ ID NO: 6834 - RNA, 19 nt, Artificial Sequence
  Synthetic
ggagaguggagauuaauua

SEQ ID NO: 6835 - RNA, 19 nt, Artificial Sequence
  Synthetic
gcuuacaaaugggaggaaa

SEQ ID NO: 6836 - RNA, 19 nt, Artificial Sequence
  Synthetic
agacgagagaugcaggaaa

SEQ ID NO: 6837 - RNA, 19 nt, Artificial Sequence
  Synthetic
augaagaagaggaugauuu

SEQ ID NO: 6838 - RNA, 19 nt, Artificial Sequence
  Synthetic
cagagaugcuuuugcuuau

SEQ ID NO: 6839 - RNA, 19 nt, Artificial Sequence
  Synthetic
acuacagaaacauggaaua

SEQ ID NO: 6840 - RNA, 19 nt, Artificial Sequence
  Synthetic
aggaaaaguucuugugcau

SEQ ID NO: 6841 - RNA, 19 nt, Artificial Sequence
  Synthetic
ccaagagguacuaugcaaa

SEQ ID NO: 6842 - RNA, 19 nt, Artificial Sequence
  Synthetic
cuuacaaaugggaggaaaa

SEQ ID NO: 6843 - RNA, 19 nt, Artificial Sequence
  Synthetic
gugggagacucuaguguau

SEQ ID NO: 6844 - RNA, 19 nt, Artificial Sequence
  Synthetic
gggaaugauuucuguaugu

SEQ ID NO: 6845 - RNA, 19 nt, Artificial Sequence
  Synthetic
ggacuugcaaagagguauu

SEQ ID NO: 6846 - RNA, 19 nt, Artificial Sequence
  Synthetic
gagagaugcaggaaauuuu

SEQ ID NO: 6847 - RNA, 19 nt, Artificial Sequence
  Synthetic
caaggauaguguuagauuu

SEQ ID NO: 6848 - RNA, 19 nt, Artificial Sequence
  Synthetic
ccuggauauugcagauaau

SEQ ID NO: 6849 - RNA, 19 nt, Artificial Sequence
  Synthetic
cacaugaagaagaggauga

SEQ ID NO: 6850 - RNA, 19 nt, Artificial Sequence
  Synthetic
uccaucaacuucaggaaua

SEQ ID NO: 6851 - RNA, 19 nt, Artificial Sequence
  Synthetic
cagauaauccaguugaaaa

SEQ ID NO: 6852 - RNA, 19 nt, Artificial Sequence
  Synthetic
ugaagaagaggaugauuuu

SEQ ID NO: 6853 - RNA, 19 nt, Artificial Sequence
  Synthetic
gggagacucuaguguauuu

SEQ ID NO: 6854 - RNA, 19 nt, Artificial Sequence
  Synthetic
ccuaaaugguaaagaguua

SEQ ID NO: 6855 - RNA, 19 nt, Artificial Sequence
  Synthetic
cagcauagcuuuuaagaau

SEQ ID NO: 6856 - RNA, 19 nt, Artificial Sequence
  Synthetic
ugacaaagcucgagcacuu

SEQ ID NO: 6857 - RNA, 19 nt, Artificial Sequence
  Synthetic
ggaacaacaaggaaagaua

SEQ ID NO: 6858 - RNA, 19 nt, Artificial Sequence
  Synthetic
ccaaaguacuggaugcaua

SEQ ID NO: 6859 - RNA, 19 nt, Artificial Sequence
  Synthetic
ggagaauggcguucaguaa

SEQ ID NO: 6860 - RNA, 19 nt, Artificial Sequence
  Synthetic
guuggaagcucuugguuua

SEQ ID NO: 6861 - RNA, 19 nt, Artificial Sequence
  Synthetic
gaagauaaaauguggguua

SEQ ID NO: 6862 - RNA, 19 nt, Artificial Sequence
  Synthetic
cuaaaguacuaaagagcau

SEQ ID NO: 6863 - RNA, 19 nt, Artificial Sequence
  Synthetic
gaacaaaugaugaugguca

SEQ ID NO: 6864 - RNA, 19 nt, Artificial Sequence
  Synthetic
cgaacaaacugcuuggauu

SEQ ID NO: 6865 - RNA, 19 nt, Artificial Sequence
  Synthetic
cuaaagagcaugugugaga

SEQ ID NO: 6866 - RNA, 19 nt, Artificial Sequence
  Synthetic
ggacaaauccuuucaguga

SEQ ID NO: 6867 - RNA, 19 nt, Artificial Sequence
  Synthetic
ucuuauagcaggagaucaa

SEQ ID NO: 6868 - RNA, 19 nt, Artificial Sequence
  Synthetic
gaacuuauaugguagacaa

SEQ ID NO: 6869 - RNA, 19 nt, Artificial Sequence
  Synthetic
uggaagaagaaaugaguuu

SEQ ID NO: 6870 - RNA, 19 nt, Artificial Sequence
  Synthetic
acacuggacuuuacagaaa

SEQ ID NO: 6871 - RNA, 19 nt, Artificial Sequence
  Synthetic
caaagaugccagaguggua

SEQ ID NO: 6872 - RNA, 19 nt, Artificial Sequence
  Synthetic
cauuaaagauugacccauu

SEQ ID NO: 6873 - RNA, 19 nt, Artificial Sequence
  Synthetic
ccugaaagccaaagcaaaa

SEQ ID NO: 6874 - RNA, 19 nt, Artificial Sequence
  Synthetic
uuaaagagcucauaagaca

SEQ ID NO: 6875 - RNA, 19 nt, Artificial Sequence
  Synthetic
aggaaauggccuuuugaua

SEQ ID NO: 6876 - RNA, 19 nt, Artificial Sequence
  Synthetic
ggaaacauugugagugcaa

SEQ ID NO: 6877 - RNA, 19 nt, Artificial Sequence
  Synthetic
gugcugaaguggaggaacu

SEQ ID NO: 6878 - RNA, 19 nt, Artificial Sequence
  Synthetic
agaaguaagccaacugaua

SEQ ID NO: 6879 - RNA, 19 nt, Artificial Sequence
  Synthetic
ucuuauguguggaggagua

SEQ ID NO: 6880 - RNA, 19 nt, Artificial Sequence
  Synthetic
ucgaggaagaagaggauuu

SEQ ID NO: 6881 - RNA, 19 nt, Artificial Sequence
  Synthetic
ccaggaguuucaagauaaa

SEQ ID NO: 6882 - RNA, 19 nt, Artificial Sequence
  Synthetic
gaacaacaaggaaagauaa

SEQ ID NO: 6883 - RNA, 19 nt, Artificial Sequence
  Synthetic
ucagaaacgucgaaagguu

SEQ ID NO: 6884 - RNA, 19 nt, Artificial Sequence
  Synthetic
ccacagagcuagacagaua

SEQ ID NO: 6885 - RNA, 19 nt, Artificial Sequence
  Synthetic
gugggaagcuagagaaauu

SEQ ID NO: 6886 - RNA, 19 nt, Artificial Sequence
  Synthetic
acgaggaguuuaagaguua

SEQ ID NO: 6887 - RNA, 19 nt, Artificial Sequence
  Synthetic
agacagagcagaugauuua

SEQ ID NO: 6888 - RNA, 19 nt, Artificial Sequence
  Synthetic
cuacagaaaucaaguggaa

SEQ ID NO: 6889 - RNA, 19 nt, Artificial Sequence
  Synthetic
ccucauagcuuugaagaaa

SEQ ID NO: 6890 - RNA, 19 nt, Artificial Sequence
  Synthetic
uugaagagaugguggaauu

SEQ ID NO: 6891 - RNA, 19 nt, Artificial Sequence
  Synthetic
ggaauugagcgcagggaau

SEQ ID NO: 6892 - RNA, 19 nt, Artificial Sequence
  Synthetic
acccuaaacuguugaauaa

SEQ ID NO: 6893 - RNA, 19 nt, Artificial Sequence
  Synthetic
ggaagaacaguuugagcaa

SEQ ID NO: 6894 - RNA, 19 nt, Artificial Sequence
  Synthetic
ccugaagguugauguauaa

SEQ ID NO: 6895 - RNA, 19 nt, Artificial Sequence
  Synthetic
gaaacaucccuuugauaaa

SEQ ID NO: 6896 - RNA, 19 nt, Artificial Sequence
  Synthetic
gcgaggagguggcagacaa

SEQ ID NO: 6897 - RNA, 19 nt, Artificial Sequence
  Synthetic
uaaaugggacagagaauaa

SEQ ID NO: 6898 - RNA, 19 nt, Artificial Sequence
  Synthetic
gugcugugguggaggaaga

SEQ ID NO: 6899 - RNA, 19 nt, Artificial Sequence
  Synthetic
acagaaaucaaguggaaaa

SEQ ID NO: 6900 - RNA, 19 nt, Artificial Sequence
  Synthetic
gcggagaggaggugcucaa

SEQ ID NO: 6901 - RNA, 19 nt, Artificial Sequence
  Synthetic
gggugaagcaggaggccau

SEQ ID NO: 6902 - RNA, 19 nt, Artificial Sequence
  Synthetic
aagaacaguuugagcaaca

SEQ ID NO: 6903 - RNA, 19 nt, Artificial Sequence
  Synthetic
ccuguuugcuggaggaaaa

SEQ ID NO: 6904 - RNA, 19 nt, Artificial Sequence
  Synthetic
aggaagaggccaaggagga

SEQ ID NO: 6905 - RNA, 19 nt, Artificial Sequence
  Synthetic
guuagaauauggagagugu

SEQ ID NO: 6906 - RNA, 19 nt, Artificial Sequence
  Synthetic
ucacaaauuucaagcggau

SEQ ID NO: 6907 - RNA, 19 nt, Artificial Sequence
  Synthetic
agacagugaucuagauguu

SEQ ID NO: 6908 - RNA, 19 nt, Artificial Sequence
  Synthetic
gcagagaggccaagccaca

SEQ ID NO: 6909 - RNA, 19 nt, Artificial Sequence
  Synthetic
cagcagugaucaaguguca

SEQ ID NO: 6910 - RNA, 19 nt, Artificial Sequence
  Synthetic
agaaacaucccuuugauaa

SEQ ID NO: 6911 - RNA, 19 nt, Artificial Sequence
  Synthetic
ccaacuucguggagacaga

SEQ ID NO: 6912 - RNA, 19 nt, Artificial Sequence
  Synthetic
ccaaugagguccaagaagu

SEQ ID NO: 6913 - RNA, 19 nt, Artificial Sequence
  Synthetic
cagaagagacaucuauuua

SEQ ID NO: 6914 - RNA, 19 nt, Artificial Sequence
  Synthetic
gcacaaaggaggacgugaa

SEQ ID NO: 6915 - RNA, 19 nt, Artificial Sequence
  Synthetic
caagaaagcuggagauuug

SEQ ID NO: 6916 - RNA, 19 nt, Artificial Sequence
  Synthetic
gaaaugagaagaaggaaca

SEQ ID NO: 6917 - RNA, 19 nt, Artificial Sequence
  Synthetic
ugacagacaaucagaggaa

SEQ ID NO: 6918 - RNA, 19 nt, Artificial Sequence
  Synthetic
ggagaaaugagaagaagga

SEQ ID NO: 6919 - RNA, 19 nt, Artificial Sequence
  Synthetic
caucuaagccacugaauca

SEQ ID NO: 6920 - RNA, 19 nt, Artificial Sequence
  Synthetic
cagcaaagaugaccguuuu

SEQ ID NO: 6921 - RNA, 19 nt, Artificial Sequence
  Synthetic
gaacauccccagagugaaa

SEQ ID NO: 6922 - RNA, 19 nt, Artificial Sequence
  Synthetic
caaguguauuucaggcuua

SEQ ID NO: 6923 - RNA, 19 nt, Artificial Sequence
  Synthetic
ccagauaguccaggugaua

SEQ ID NO: 6924 - RNA, 19 nt, Artificial Sequence
  Synthetic
gugauaaacuugugaucgu

SEQ ID NO: 6925 - RNA, 19 nt, Artificial Sequence
  Synthetic
aaagggacaugcaaggaaa

SEQ ID NO: 6926 - RNA, 19 nt, Artificial Sequence
  Synthetic
gggaagaauuggccacguu

SEQ ID NO: 6927 - RNA, 19 nt, Artificial Sequence
  Synthetic
ggauauuucaagagaacaa

SEQ ID NO: 6928 - RNA, 19 nt, Artificial Sequence
  Synthetic
ggaaggaggaucuggacaa

SEQ ID NO: 6929 - RNA, 19 nt, Artificial Sequence
  Synthetic
agauaguccaggugauaaa

SEQ ID NO: 6930 - RNA, 19 nt, Artificial Sequence
  Synthetic
ccucagugcagauggagaa

SEQ ID NO: 6931 - RNA, 19 nt, Artificial Sequence
  Synthetic
cagcaacguuggugaagau

SEQ ID NO: 6932 - RNA, 19 nt, Artificial Sequence
  Synthetic
ggaaaugacugaugcucga

SEQ ID NO: 6933 - RNA, 19 nt, Artificial Sequence
  Synthetic
gcggauauuucaagagaac

SEQ ID NO: 6934 - RNA, 19 nt, Artificial Sequence
  Synthetic
gaacaagaaagcuggagau

SEQ ID NO: 6935 - RNA, 19 nt, Artificial Sequence
  Synthetic
gguccgaacacuuguacaa

SEQ ID NO: 6936 - RNA, 19 nt, Artificial Sequence
  Synthetic
caaaggaggacgugaacca

SEQ ID NO: 6937 - RNA, 19 nt, Artificial Sequence
  Synthetic
ggacaaugccagcaaagau

SEQ ID NO: 6938 - RNA, 19 nt, Artificial Sequence
  Synthetic
gggaaaggcugguguggac

SEQ ID NO: 6939 - RNA, 19 nt, Artificial Sequence
  Synthetic
ucgccauguugaaggacaa

SEQ ID NO: 6940 - RNA, 19 nt, Artificial Sequence
  Synthetic
caagacaggaaguggauca

SEQ ID NO: 6941 - RNA, 19 nt, Artificial Sequence
  Synthetic
gcgaaggugaggaagaaaa

SEQ ID NO: 6942 - RNA, 19 nt, Artificial Sequence
  Synthetic
aaugcuaccacaagaaaua

SEQ ID NO: 6943 - RNA, 19 nt, Artificial Sequence
  Synthetic
cagaaggcccugagcauca

SEQ ID NO: 6944 - RNA, 19 nt, Artificial Sequence
  Synthetic
gaaacaacgcugagugaaa

SEQ ID NO: 6945 - RNA, 19 nt, Artificial Sequence
  Synthetic
ggagaaaggcgaaccaaua

SEQ ID NO: 6946 - RNA, 19 nt, Artificial Sequence
  Synthetic
gcaauaaauuucagggagu

SEQ ID NO: 6947 - RNA, 19 nt, Artificial Sequence
  Synthetic
gaaugaaaguccacagaca

SEQ ID NO: 6948 - RNA, 19 nt, Artificial Sequence
  Synthetic
cauaauagggucaguagaa

SEQ ID NO: 6949 - RNA, 19 nt, Artificial Sequence
  Synthetic
cuggagaacugauaauaaa

SEQ ID NO: 6950 - RNA, 19 nt, Artificial Sequence
  Synthetic
ugacauugaaacagacaaa

SEQ ID NO: 6951 - RNA, 19 nt, Artificial Sequence
  Synthetic
ccaaguaguaauggagaaa

SEQ ID NO: 6952 - RNA, 19 nt, Artificial Sequence
  Synthetic
agaauuugcuguggagaua

SEQ ID NO: 6953 - RNA, 19 nt, Artificial Sequence
  Synthetic
guagaaggauggacacauu

SEQ ID NO: 6954 - RNA, 19 nt, Artificial Sequence
  Synthetic
aauaaaacccacagcaaua

SEQ ID NO: 6955 - RNA, 19 nt, Artificial Sequence
  Synthetic
augaaaguccacagacaaa

SEQ ID NO: 6956 - RNA, 19 nt, Artificial Sequence
  Synthetic
cgaggaggcaccugcgaaa

SEQ ID NO: 6957 - RNA, 19 nt, Artificial Sequence
  Synthetic
gagaaaggcgaaccaauaa

SEQ ID NO: 6958 - RNA, 19 nt, Artificial Sequence
  Synthetic
uaaaggaggcaaaggaaga

SEQ ID NO: 6959 - RNA, 19 nt, Artificial Sequence
  Synthetic
uagaaauccaauugaggaa

SEQ ID NO: 6960 - RNA, 19 nt, Artificial Sequence
  Synthetic
caauaaauuucagggagua

SEQ ID NO: 6961 - RNA, 19 nt, Artificial Sequence
  Synthetic
cgauauugcaugacauuga

SEQ ID NO: 6962 - RNA, 19 nt, Artificial Sequence
  Synthetic
ucacuguaaaggaggcaaa

SEQ ID NO: 6963 - RNA, 19 nt, Artificial Sequence
  Synthetic
cagaauuugcuguggagau

SEQ ID NO: 6964 - RNA, 19 nt, Artificial Sequence
  Synthetic
cagaaacaacgcugaguga

SEQ ID NO: 6965 - RNA, 19 nt, Artificial Sequence
  Synthetic
cgaggaaagccuauauuau

SEQ ID NO: 6966 - RNA, 19 nt, Artificial Sequence
  Synthetic
gaggaaagccuauauuauu

SEQ ID NO: 6967 - RNA, 19 nt, Artificial Sequence
  Synthetic
ugaaagagcuuaugauccu

SEQ ID NO: 6968 - RNA, 19 nt, Artificial Sequence
  Synthetic
ccuggagaacugauaauaa

SEQ ID NO: 6969 - RNA, 19 nt, Artificial Sequence
  Synthetic
cuucgaaucuuccuaaaua

SEQ ID NO: 6970 - RNA, 19 nt, Artificial Sequence
  Synthetic
gaaaugacuuccaaugaca

SEQ ID NO: 6971 - RNA, 19 nt, Artificial Sequence
  Synthetic
ggagaaaggcgaacagaua

SEQ ID NO: 6972 - RNA, 19 nt, Artificial Sequence
  Synthetic
ccaaauagaaauggagaaa

SEQ ID NO: 6973 - RNA, 19 nt, Artificial Sequence
  Synthetic
gauaaaacccacagcgaaa

SEQ ID NO: 6974 - RNA, 19 nt, Artificial Sequence
  Synthetic
agaaaggcgaacagauaaa

SEQ ID NO: 6975 - RNA, 19 nt, Artificial Sequence
  Synthetic
agucugguguauagaguua

SEQ ID NO: 6976 - RNA, 19 nt, Artificial Sequence
  Synthetic
gagaaaggcgaacagauaa

SEQ ID NO: 6977 - RNA, 19 nt, Artificial Sequence
  Synthetic
gaaauauguucaacugcaa

SEQ ID NO: 6978 - RNA, 19 nt, Artificial Sequence
  Synthetic
auaauagggucguuagaau

SEQ ID NO: 6979 - RNA, 19 nt, Artificial Sequence
  Synthetic
ucauaugacagcaagauua

SEQ ID NO: 6980 - RNA, 19 nt, Artificial Sequence
  Synthetic
uguaaaggaggcacagaua

SEQ ID NO: 6981 - RNA, 19 nt, Artificial Sequence
  Synthetic
cugauaagaaggcggguuu

SEQ ID NO: 6982 - RNA, 19 nt, Artificial Sequence
  Synthetic
caaaggaaagccuguauua

SEQ ID NO: 6983 - RNA, 19 nt, Artificial Sequence
  Synthetic
gaauauucccagauggaca

SEQ ID NO: 6984 - RNA, 19 nt, Artificial Sequence
  Synthetic
cauaugacagcaagauuaa

SEQ ID NO: 6985 - RNA, 19 nt, Artificial Sequence
  Synthetic
gaaagaaagcccacacaca

SEQ ID NO: 6986 - RNA, 19 nt, Artificial Sequence
  Synthetic
uaucagugaaaguguguua

SEQ ID NO: 6987 - RNA, 19 nt, Artificial Sequence
  Synthetic
ucaaggaaguugugcgguu

SEQ ID NO: 6988 - RNA, 19 nt, Artificial Sequence
  Synthetic
aggaaagccuguauuauuu

SEQ ID NO: 6989 - RNA, 19 nt, Artificial Sequence
  Synthetic
guggauggcucaagaucuu

SEQ ID NO: 6990 - RNA, 19 nt, Artificial Sequence
  Synthetic
uagauaagaaacaccgaaa

SEQ ID NO: 6991 - RNA, 19 nt, Artificial Sequence
  Synthetic
uaaaggaggcacagauaga

SEQ ID NO: 6992 - RNA, 19 nt, Artificial Sequence
  Synthetic
ucuguaugaugaugugaaa

SEQ ID NO: 6993 - RNA, 19 nt, Artificial Sequence
  Synthetic
aggaaguaaaugaguggau

SEQ ID NO: 6994 - RNA, 19 nt, Artificial Sequence
  Synthetic
cuugaaaagcugauaagaa

SEQ ID NO: 6995 - RNA, 19 nt, Artificial Sequence
  Synthetic
gaaaggagacagcaguauu

SEQ ID NO: 6996 - RNA, 19 nt, Artificial Sequence
  Synthetic
ugacagcaagauuaagaaa

SEQ ID NO: 6997 - RNA, 19 nt, Artificial Sequence
  Synthetic
aaggaaagccuguauuauu

SEQ ID NO: 6998 - RNA, 19 nt, Artificial Sequence
  Synthetic
gcacacaucuuuuauugaa

SEQ ID NO: 6999 - RNA, 19 nt, Artificial Sequence
  Synthetic
guauagaguuauggauuca

SEQ ID NO: 7000 - RNA, 19 nt, Artificial Sequence
  Synthetic
ucaccaaggaaguaaauga

SEQ ID NO: 7001 - RNA, 19 nt, Artificial Sequence
  Synthetic
gauaagagguacagagauu

SEQ ID NO: 7002 - RNA, 19 nt, Artificial Sequence
  Synthetic
ggaauaugaucgaggaaca

SEQ ID NO: 7003 - RNA, 19 nt, Artificial Sequence
  Synthetic
ccagauaacugcaaagcaa

SEQ ID NO: 7004 - RNA, 19 nt, Artificial Sequence
  Synthetic
gcuaugugguugagggcua

SEQ ID NO: 7005 - RNA, 19 nt, Artificial Sequence
  Synthetic
gcugauggcuuuugugaaa

SEQ ID NO: 7006 - RNA, 19 nt, Artificial Sequence
  Synthetic
ggaaggaaagggagagauu

SEQ ID NO: 7007 - RNA, 19 nt, Artificial Sequence
  Synthetic
aaggaaagggagagauuaa

SEQ ID NO: 7008 - RNA, 19 nt, Artificial Sequence
  Synthetic
ugaagaagaaggugauuaa

SEQ ID NO: 7009 - RNA, 19 nt, Artificial Sequence
  Synthetic
gcauggaaauggagggcau

SEQ ID NO: 7010 - RNA, 19 nt, Artificial Sequence
  Synthetic
uggcagaaacagaggacua

SEQ ID NO: 7011 - RNA, 19 nt, Artificial Sequence
  Synthetic
guacauagcuuauugucaa

SEQ ID NO: 7012 - RNA, 19 nt, Artificial Sequence
  Synthetic
gcagaaacgucaugaagau

SEQ ID NO: 7013 - RNA, 19 nt, Artificial Sequence
  Synthetic
gauacguaccugugggaaa

SEQ ID NO: 7014 - RNA, 19 nt, Artificial Sequence
  Synthetic
agaacaggguauugcauua

SEQ ID NO: 7015 - RNA, 19 nt, Artificial Sequence
  Synthetic
guaugaacguguauguaaa

SEQ ID NO: 7016 - RNA, 19 nt, Artificial Sequence
  Synthetic
gagugaagcuauugauaca

SEQ ID NO: 7017 - RNA, 19 nt, Artificial Sequence
  Synthetic
ugaaagagcacgaggaguu

SEQ ID NO: 7018 - RNA, 19 nt, Artificial Sequence
  Synthetic
ugaagaagcuggcgcacaa

SEQ ID NO: 7019 - RNA, 19 nt, Artificial Sequence
  Synthetic
cagacaaguuucagaugua

SEQ ID NO: 7020 - RNA, 19 nt, Artificial Sequence
  Synthetic
cgaccuauccguagcauua

SEQ ID NO: 7021 - RNA, 19 nt, Artificial Sequence
  Synthetic
cagcgaaccacuugauaaa

SEQ ID NO: 7022 - RNA, 19 nt, Artificial Sequence
  Synthetic
accuaaagccugagaauau

SEQ ID NO: 7023 - RNA, 19 nt, Artificial Sequence
  Synthetic
ccagcaugccauugagaaa

SEQ ID NO: 7024 - RNA, 19 nt, Artificial Sequence
  Synthetic
gugcagucaucguggagaa

SEQ ID NO: 7025 - RNA, 19 nt, Artificial Sequence
  Synthetic
ccgaaaaguauaugagcaa

SEQ ID NO: 7026 - RNA, 19 nt, Artificial Sequence
  Synthetic
cgucagugcaauugaggaa

SEQ ID NO: 7027 - RNA, 19 nt, Artificial Sequence
  Synthetic
ugaaggaggaugagaucaa

SEQ ID NO: 7028 - RNA, 19 nt, Artificial Sequence
  Synthetic
cugaugacaugaaaggaaa

SEQ ID NO: 7029 - RNA, 19 nt, Artificial Sequence
  Synthetic
gcaagcaccuggagcagaa

SEQ ID NO: 7030 - RNA, 19 nt, Artificial Sequence
  Synthetic
gcaaggauucgacgggaaa

SEQ ID NO: 7031 - RNA, 19 nt, Artificial Sequence
  Synthetic
caucagauuuugaggaaua

SEQ ID NO: 7032 - RNA, 19 nt, Artificial Sequence
  Synthetic
cagaagaaaugaaggaaga

SEQ ID NO: 7033 - RNA, 19 nt, Artificial Sequence
  Synthetic
cugcaaggcugaagaaauu

SEQ ID NO: 7034 - RNA, 19 nt, Artificial Sequence
  Synthetic
ggacacagguucugaaaca

SEQ ID NO: 7035 - RNA, 19 nt, Artificial Sequence
  Synthetic
ggaagaggaagaugaaaua

SEQ ID NO: 7036 - RNA, 19 nt, Artificial Sequence
  Synthetic
caaauaaucuggacaacaa

SEQ ID NO: 7037 - RNA, 19 nt, Artificial Sequence
  Synthetic
ggagaaaguaccagcggaa

SEQ ID NO: 7038 - RNA, 19 nt, Artificial Sequence
  Synthetic
caagagaggaagaggaaga

SEQ ID NO: 7039 - RNA, 19 nt, Artificial Sequence
  Synthetic
agaaggagcacgagaaaga

SEQ ID NO: 7040 - RNA, 19 nt, Artificial Sequence
  Synthetic
aggaagaggaagaugaaau

SEQ ID NO: 7041 - RNA, 19 nt, Artificial Sequence
  Synthetic
cuacaaugcaucaguauua

SEQ ID NO: 7042 - RNA, 19 nt, Artificial Sequence
  Synthetic
aggaagaggaagaaaguga

SEQ ID NO: 7043 - RNA, 19 nt, Artificial Sequence
  Synthetic
gaagauggcauguaauaaa

SEQ ID NO: 7044 - RNA, 19 nt, Artificial Sequence
  Synthetic
gcacuuagguguagggaug

SEQ ID NO: 7045 - RNA, 19 nt, Artificial Sequence
  Synthetic
gcacaucagcagcaagaaa

SEQ ID NO: 7046 - RNA, 19 nt, Artificial Sequence
  Synthetic
cgagaaggagcacgagaaa

SEQ ID NO: 7047 - RNA, 19 nt, Artificial Sequence
  Synthetic
ugaaagaacaccugcgaau

SEQ ID NO: 7048 - RNA, 19 nt, Artificial Sequence
  Synthetic
cggaggagagggagaguau

SEQ ID NO: 7049 - RNA, 19 nt, Artificial Sequence
  Synthetic
gaacauuaauugugagaug

SEQ ID NO: 7050 - RNA, 19 nt, Artificial Sequence
  Synthetic
gugucagauuuguaagaaa

SEQ ID NO: 7051 - RNA, 19 nt, Artificial Sequence
  Synthetic
ccaccgagcugcugaugaa

SEQ ID NO: 7052 - RNA, 19 nt, Artificial Sequence
  Synthetic
ccacaaagaacaaaacaaa

SEQ ID NO: 7053 - RNA, 19 nt, Artificial Sequence
  Synthetic
gggcuuacuugcagagcau

SEQ ID NO: 7054 - RNA, 19 nt, Artificial Sequence
  Synthetic
uguagaugguccagaagaa

SEQ ID NO: 7055 - RNA, 19 nt, Artificial Sequence
  Synthetic
cgagaaagaaggcgaggau

SEQ ID NO: 7056 - RNA, 19 nt, Artificial Sequence
  Synthetic
gcacaugaaucacagguau

SEQ ID NO: 7057 - RNA, 19 nt, Artificial Sequence
  Synthetic
ggagcuggguauuguuaaa

SEQ ID NO: 7058 - RNA, 19 nt, Artificial Sequence
  Synthetic
ugacaagacauuccagaaa

SEQ ID NO: 7059 - RNA, 19 nt, Artificial Sequence
  Synthetic
gagacuaauuccuguguuu

SEQ ID NO: 7060 - RNA, 19 nt, Artificial Sequence
  Synthetic
cgagaagaaugaagagaac

SEQ ID NO: 7061 - RNA, 19 nt, Artificial Sequence
  Synthetic
cuggcgagguauugggaaa

SEQ ID NO: 7062 - RNA, 19 nt, Artificial Sequence
  Synthetic
cguuguaacaucuguaaua

SEQ ID NO: 7063 - RNA, 19 nt, Artificial Sequence
  Synthetic
aauaaaugaaggagagcau

SEQ ID NO: 7064 - RNA, 19 nt, Artificial Sequence
  Synthetic
gagcauucauccagcagaa

SEQ ID NO: 7065 - RNA, 19 nt, Artificial Sequence
  Synthetic
augaagaggacgacgagaa

SEQ ID NO: 7066 - RNA, 19 nt, Artificial Sequence
  Synthetic
acgccaggcugaagagaga

SEQ ID NO: 7067 - RNA, 19 nt, Artificial Sequence
  Synthetic
gguauugggaaaugagaga

SEQ ID NO: 7068 - RNA, 19 nt, Artificial Sequence
  Synthetic
agaaaucgcuccaggcuca

SEQ ID NO: 7069 - RNA, 19 nt, Artificial Sequence
  Synthetic
ucuucacaccggagagaaa

SEQ ID NO: 7070 - RNA, 19 nt, Artificial Sequence
  Synthetic
gcagauucacccaugcaaa

SEQ ID NO: 7071 - RNA, 19 nt, Artificial Sequence
  Synthetic
gaggugaggacgaggagga

SEQ ID NO: 7072 - RNA, 19 nt, Artificial Sequence
  Synthetic
cagcaggacccucuggaau

SEQ ID NO: 7073 - RNA, 19 nt, Artificial Sequence
  Synthetic
agcaggacccucuggaaua

SEQ ID NO: 7074 - RNA, 19 nt, Artificial Sequence
  Synthetic
agauacuguccgcgauuua

SEQ ID NO: 7075 - RNA, 19 nt, Artificial Sequence
  Synthetic
aaggcaagcugguucagaa

SEQ ID NO: 7076 - RNA, 19 nt, Artificial Sequence
  Synthetic
gcacacaacgugacgcuca

SEQ ID NO: 7077 - RNA, 19 nt, Artificial Sequence
  Synthetic
agucugaugaagaggacga

SEQ ID NO: 7078 - RNA, 19 nt, Artificial Sequence
  Synthetic
gcagauacuguccgcgauu

SEQ ID NO: 7079 - RNA, 19 nt, Artificial Sequence
  Synthetic
ccacggacacacucagcaa

SEQ ID NO: 7080 - RNA, 19 nt, Artificial Sequence
  Synthetic
agagaggagcccacggaca

SEQ ID NO: 7081 - RNA, 19 nt, Artificial Sequence
  Synthetic
ggacacacucagcaaacau

SEQ ID NO: 7082 - RNA, 19 nt, Artificial Sequence
  Synthetic
gcucacaaaaggacucaua

SEQ ID NO: 7083 - RNA, 19 nt, Artificial Sequence
  Synthetic
gauggaauccgacguggua

SEQ ID NO: 7084 - RNA, 19 nt, Artificial Sequence
  Synthetic
ucagcgacuucauggugua

SEQ ID NO: 7085 - RNA, 19 nt, Artificial Sequence
  Synthetic
ucauagagcuugccaaccu

SEQ ID NO: 7086 - RNA, 19 nt, Artificial Sequence
  Synthetic
gcgagguauugggaaauga

SEQ ID NO: 7087 - RNA, 19 nt, Artificial Sequence
  Synthetic
caucuguaauaggguguuu

SEQ ID NO: 7088 - RNA, 19 nt, Artificial Sequence
  Synthetic
caaaguggacagcucaaaa

SEQ ID NO: 7089 - RNA, 19 nt, Artificial Sequence
  Synthetic
cagaauccguuguaacauc

SEQ ID NO: 7090 - RNA, 19 nt, Artificial Sequence
  Synthetic
gaagcgagcagcccagaca

We claim:

1. An siRNA comprising a sense region and an antisense region, wherein said sense region and said antisense region together form a duplex region, said antisense region and said sense region are each 18-30 nucleotides in length and said antisense region comprises a sequence that is at least 90% complementary to a sequence selected from the group consisting of SEQ. ID NOs. 438-1049, 1080-1805, 1836-5569, 5600-7090.

2. An siRNA comprising a sense region and an antisense region, wherein said sense region and said antisense region together form a duplex region and said sense region and said antisense region are each 18-30 nucleotides in length, and said antisense region comprises a sequence that is 100% complementary to a contiguous stretch of at least 18 bases of a sequence selected from the group consisting of SEQ. ID NOs. 438-1049, 1080-1805, 1836-5569, 5600-7090.

3. The siRNA of claim 2, wherein each of said antisense region and said sense region are 19-30 nucleotides in length, and said antisense region comprises a sequence that is 100% complementary to said sequence selected from the group consisting of: SEQ. ID NOs. 438-1049, 1080-1805, 1836-5569, 5600-7090.

4. A pool of at least two siRNAs, wherein said pool comprises a first siRNA and a second siRNA, said first siRNA comprises a first antisense region and a first sense region that together form a first duplex region and each of said first antisense region and said first sense region are 18-30 nucleotides in length and said first antisense region is at least 90% complementary to 18 bases of a first sequence selected from the group consisting of: SEQ. ID NOs. 438-1049, 1080-1805, 1836-5569, 5600-7090 and said second siRNA comprises a second antisense region and a second sense region that together form a second duplex region and each of said second antisense region and said second sense region are 18-30 nucleotides in length and said second antisense region is at least 90% complementary to 18 bases of a second sequence selected from the group consisting of: SEQ. ID NOs. 438-1049, 1080-1805, 1836-5569, 5600-7090, wherein said first antisense region and said second antisense region are not identical.

5. The pool of claim 4, wherein said first antisense region comprises a sequence that is 100% complementary to at least 18 bases of said first sequence, and said second antisense region comprises a sequence that is 100% complementary to at least 18 bases of said second sequence.

6. The pool of claim 4, wherein said first siRNA is 19-30 nucleotides in length and said first antisense region comprises a sequence that is at least 90% complementary to said first sequence, and second siRNA is 19-30 nucleotides in length and said second antisense region comprises a sequence that is at least 90% complementary to said second sequence.

7. The pool of claim 4, wherein said first antisense region is 19-30 nucleotides in length and said first antisense region comprises a sequence that is 100% complementary to at least 18 bases of said first sequence, and said second antisense region is 19-30 nucleotides in length and said second antisense region comprises a sequence that is 100% complementary to said second sequence.

8. The siRNA of claim 1, wherein said antisense region and said sense region are each 19-25 nucleotides in length.

9. The siRNA of claim 4, wherein said first antisense region, said first sense region, said second sense region and said second antisense region are each 19-25 nucleotides in length.
